(19) United States
(12) Patent Application Publication
(10) Pub. No.: US 2010/0099091 A1
(43) Pub. Date: Apr. 22, 2010

(54) GENETIC COMPONENT OF COMPLICATIONS IN TYPE 2 DIABETES

(76) Inventors: Pavel Hamet, Ville Mont-Royal (CA); Johanne Tremblay, Ville Mont-Royal (CA); Ondrej Seda, Boucherville (CA); Stephen Macmahon, Sydney (AU); John Chalmers, Sydney (AU)

Correspondence Address: MILLEN, WHITE, ZELANO & BRANIGAN, P.C., 2200 CLARENDON BLVD., SUITE 1400, ARLINGTON, VA, 22201, US

(21) Appl. No.: 12/457,555

(22) Filed: Jun. 15, 2009

Related U.S. Application Data
(60) Provisional application No. 61/061,389, filed on Jun. 13, 2008.

(51) Int. Cl. C12Q 1/68

(52) U.S. Cl. 435/6

(57) ABSTRACT

The invention provides with means to predict, in subjects affected by type 2 diabetes (T2D), the probability of developing complications related to the disease. The invention involves 1) use of genetic features (SNPs, STRs, or other genomic markers) together with other chromosomal features and phenotypic information to establish a patient profile specifically developed for prediction of complications of T2D 2) use of a set of SNPs allowing to discriminate between individuals according to their descent. A preferred set of genomic markers selected for their association with complications of T2D is provided that can be used with a set of complementary phenotypic markers to evaluate the risk for an individual affected by T2D to develop complications related to the disease and to evaluate the likelihood that an individual affected by T2D type will benefit from treatments reducing the risk of developing such complications.

[0001] This application claims the benefit of U.S. provisional Application No. 61/061,389, filed on Jun. 13, 2008, the disclosure of which is incorporated herein by reference in its entirety.

[0002] The invention provides means and methods to predict, in subjects affected by type II diabetes (T2D), the probability of developing complications related to the disease.

[0003] Diabetes mellitus is a heterogeneous group of metabolic diseases which is characterized by elevated blood glucose levels and increased morbidity. The endocrine cells of the pancreas which synthesize insulin and other hormones are involved in the pathogenesis of diabetes. Both genetic and environmental factors contribute to its development. The most common form is T2D, which is characterized by defects in both insulin secretion and insulin action. In contrast, type I diabetes results from autoimmune destruction of the insulin-producing beta cells of the pancreas. Monogenic forms of diabetes account for less than 5% of the cases and are usually caused by mutations in genes associated with maturity-onset diabetes of the young (MODY), insulin gene and insulin receptor gene.

[0004] T2D is a heterogeneous disease resulting from the interaction of environmental factors such as obesity or sedentary lifestyle, with variety of diabetogenic genes. Abnormal glucose homeostasis occurs when either insulin sensitivity or insulin secretion or both are altered. An early finding in this development is insulin resistance, defined as impaired insulin-mediated glucose clearance in insulin-sensitive tissues (skeletal muscle, liver and adipose tissue). Elevation of glucose levels triggers beta-cells to produce and secrete more insulin, which compensates for the disturbance in glucose homeostasis. The duration of hyperglycemia-hyperinsulinemia state depends on insulin secretory capacity, mass and apoptosis rate of beta-cells. Furthermore, beta-cells can loose their insulin secretion capacity because of glucose toxicity or other reasons. When cells fail to compensate for insulin resistance blood glucose concentration increases. Thus, over time subclinical hyperglycemia tends to progress to impaired glucose tolerance and further to T2D.

[0005] The causes of T2D are multi-factorial and include both genetic and environmental elements that affect beta cell function and insulin sensitivity of peripheral tissues (muscle, liver, adipose tissue, pancreas). Although there is considerable debate as to the relative contributions of beta-cell dysfunction and reduced insulin sensitivity to the pathogenesis of diabetes, it is generally agreed that both of these factors play important roles. Both impaired insulin secretion and insulin action cause the development of T2D. Insulin resistance is an early feature in the pathophysiology of T2D.

[0006] No major single gene explaining the development of T2D has been identified. There were several studies attempting to predict T2D based on limited number of SNPs (up to 18) [Lyssenko, V, P Almgren, D Anevski et al.: Genetic prediction of future type 2 diabetes. PLoS Med 2, e345 (2005); Meigs, J B, P Shrader, L M Sullivan et al.: Genotype score in addition to common risk factors for prediction of type 2 diabetes. N Engl J Med 359, 2208-19 (2008); Cauchi, S, D Meyre, E Durand et al.: Post genome-wide association studies of novel genes associated with type 2 diabetes show gene-gene interaction and high predictive value. PLoS ONE 3, e2031 (2008). Miyake, K, W Yang, K Hara et al.: Construction of a prediction model for type 2 diabetes mellitus in the Japanese population based on 11 genes with strong evidence of the association. J Hum Genet 54, 236-41 (2009); Lin, X, K Song, N Lim et al.: Risk prediction of prevalent diabetes in a Swiss population using a weighted genetic score—the CoLaus Study. Diabetologia 52, 600-8 (2009)] but the reached predictive power was generally limited. Indeed, the mathematical models reflecting the presumable allele frequencies and risk effects estimate that for successful prediction, hundreds of SNPs will be necessary [(Kraft, P, D J Hunter: Genetic Risk Prediction—Are We There Yet? N Engl J Med 360, 1701-1703 (2009)].

[0007] Complications Associated with Diabetes

[0008] Over 90% of people diagnosed with diabetes have T2D, which carries a number of potential complications. These complications currently add very significantly to the cost of treating diabetes, because there is no reliable way to determine which patients are likely to develop such difficulties. Half of the people affected by T2D die from complications resulting from the disease.

[0009] Such complications include, but are not limited to:

[0010] Cardiovascular Disease

[0011] Cardiovascular disease is the overwhelming cause of diabetes-related deaths. With the risk for stroke or myocardial infarction elevated by 2 to 4 times in persons with diabetes, a 65% majority of deaths among people with diabetes occurs from heart disease or stroke, considered as major macrovascular complications.

[0012] Diabetic Nephropathy

[0013] End-stage renal disease (ESRD) occurs when the kidneys cease to function, which ultimately leads to the need for a transplant or regular dialysis, both extremely costly procedures. Diabetes is responsible for 43% of the cases of ESRD as a consequence of microvascular damage of the kidney.

[0014] Diabetic Retinopathy

[0015] Diabetes is also the leading cause of blindness in people aged 20-74. Diabetic retinopathy is considered as one type of microvascular complication and is responsible for over 24,000 cases of blindness in the United States.

[0016] Diabetic Neuropathy

[0017] It is estimated that over 70% of people with diabetes may also suffer from nervous system damage, causing impaired sensation or pain in the feet or hands, slowed digestion of food in the stomach, carpal tunnel syndrome, and other nerve problems. In the severe cases of diabetic neuropathy, usually combined with peripheral vessel macro and microvascular disease, patients may have to undergo lower-extremity amputations.

[0018] Dental disease, complications of pregnancy, coma, and acute susceptibility to opportunistic infectious diseases are also costly diabetes-related diseases.

[0019] Drugs designed to prevent or stabilize complications are extremely costly. Because of the debilitating effects of diabetes-related complications, healthcare professionals are forced to prescribe costly medications to diabetes patients to protect them against developing these complications without having any efficient and reliable mean to predict those patients who will develop these complications and the efficiency of these treatments.

[0020] There is a need for assays capable of identifying among T2D patients those who are at risk of developing complications and those who would benefit from the various treatments available. The present invention provides with means to develop such assays and to utilize them in a clinical and medical environment.

[0021] Polymorphisms

[0022] DNA polymorphisms provide an efficient way to study the association of genes and diseases by analysis of linkage and linkage disequilibrium. With the sequencing of the human genome a myriad of hitherto unknown genetic polymorphisms among people have been detected. Most common among these are the single nucleotide polymorphisms, also called SNPs, of which there are known several millions. Other examples are short tandem repeat polymorphisms (STR), variable number of tandem repeat polymorphisms (VNTR), insertions, deletions and block modifications. Tandem repeats (STR or VNTR) often have multiple different alleles (variants) in population, whereas the other groups of polymorphisms usually have just two alleles. Some of these genetic polymorphisms play a direct role in the biology of the individuals, including their risk of developing disease, but the virtue of the majority is that they can serve as markers for the surrounding DNA. The relationship of an allele of one sequence polymorphism with particular alleles of other sequence polymorphisms in the surrounding is due to phenomenon called genetic linkage. Linkage arises because large parts of chromosomes are passed unchanged from parents to offspring, so that minor regions of a chromosome tend to flow unchanged from one generation to the next and also to be similar in different branches of the same family. Linkage is gradually eroded by recombination occurring in the germline cells, but typically operates over multiple generations and distances of a number of million bases in the DNA.

[0023] Linkage disequilibrium deals with whole populations and has its origin in the (distant) forefather in whose DNA a new sequence polymorphism arose. The immediate surroundings in the DNA of the forefather will tend to stay with the new allele and propagate together to the offspring for many generations. Recombination and changes in the composition of the population will again erode the association, but the new allele and the alleles of any other polymorphism nearby will often be partly associated among unrelated humans even today. A crude estimate suggests that alleles of sequence polymorphisms with distances less than 10000 bases in the DNA will have tended to stay together since modern man arose. Linkage disequilibrium in limited populations, for instance Europeans, often extends over longer distances, e.g. over more than 1,000,000 bases. This can be the result of newer mutations, but can also be a consequence of one or more “bottlenecks” with small effective population sizes and considerable inbreeding in the history of the current population. Two obvious possibilities for “bottlenecks” in Europeans are the exodus from Africa and the repopulation of Europe after the last ice age. A number of polymorphisms have been associated with induction of exocrine pancreatic dysfunction and/or diabetes. Some of the identified polymorphisms have been suggested in patent literature as useful in diagnosis of diabetes (see for example WO9321343 related to polymorphisms in GCK gene, and WO0023591 related to polymorphism in ZSIG49 gene).

[0024] Up to date, several genomic regions or individual genetic variants have been found to be linked or associated to the phenotypes closely related to diabetic complications.

[0025] Linkage Studies

[0026] In a recent study (Diabetes. 2008 January; 57(1):235-43), a genome-wide scan for estimated glomerular filtration rate was performed in multi-ethnic diabetic populations (the Family Investigation of Nephropathy and Diabetes (FIND)) using 404 STR markers. For all ethnicities combined, strong evidence for linkage was observed on chromosomes 1q43, 7q36.1, 8q13.3 and 18q23.3. Mexican-American families, who comprised the major ethnic subpopulation in FIND, contributed to linkage on chromosomes 1q43, 2p13.3, 7q36.1, 8q13.3, and 18q23.3, whereas African-American and American-Indian families displayed linkage peaks on chromosomes 11p15.1 and 15q22.3, respectively. Also in FIND study (Diabetes. 2007 June; 56(6):1577-85), the strongest evidence of linkage to the diabetic nephropathy trait was on chromosomes 7q21.3, 10p15.3, 14q23.1, and 18q22.3. In ACR (883 diabetic sibling pairs), the strongest linkage signals were on chromosomes 2q14.1, 7q21.1, and 15q26.3. These results confirm regions of linkage to diabetic nephropathy on chromosomes 7q, 10p, and 18q from prior reports. In Mexican Americans, Puppala al. (Diabetes. 2007 November; 56 (11):2818-28) found a linkage of glomerular filtration rate to a region on chromosome 2q near marker D2S427 (corrected LOD score 3.3), influenced by genotype by diabetes interaction.

[0027] Association Studies

[0028] A number of genes and genetic polymorphisms were tested for their association to diabetic nephropathy, either because of their reported relevance in metabolic and signaling pathways connected to pathophysiology of diabetic complications (functional candidates) or combination of the former with their genomic position under peak of ascertained linkage (positional candidates), or as a result of genome-wide association studies. Genes for which an association was found with diabetic nephropathy include 5,10-methylenetetrahydrofolate reductase (MTHFR), natriuretic peptide precursor A (NPPA), solute carrier family 2 member 1 (facilitated glucose transporter SLC2A1), lamin A/C (LMNA), retinoid X receptor gamma (RXRG), interleukin 1 receptor antagonist (IL1RN), ghrelin/obestatin preprohormone (GHRL), peroxisome proliferator-activated receptor gamma (PPARG), chemokine receptor 5 (CCR5), angiotensin II receptor type 1 (AGTR1), solute carrier family 2 member 2 (facilitated glucose transporter SLC2A2), adiponectin (ADIPOQ), fatty acid binding protein 2 (FABP2), glutamine-fructose-6-phosphate transaminase 2 (GFPT2), advanced glycosylation end product-specific receptor (AGER), lymphotoxin alpha (LTA), vascular endothelial growth factor A (VEGF), ectonucleotide pyrophosphatase/phosphodiesterase 1 (ENPP1), SMT3 suppressor of mif two 3 homolog 4 (small ubiquitin-like modifier 4 protein SUMO4), estrogen receptor 1 (ESR1), superoxide dismutase 2 (SOD2), neuropeptide Y (NPY), engulfment and cell motility 1 (ELMO1), insulin-like growth factor binding protein 1 (IGFBP1), epidermal growth factor receptor (EGFR), paraoxonase 1 (PON1), aldo-keto reductase family 1, member B1 (AKR1B1), caldesmon 1 (CALD1), nitric oxide synthase 3 (NOS3), lipoprotein lipase (LPL), Pvt1 oncogene homolog MYC activator (PVT1), insulin (INS), xylosyltransferase I (XYLT), protein kinase C beta 1 (PRKCB1), solute carrier family 12 (SLC12A3), haptoglobin (HP), chemokine ligand 2 (CCL2), angiotensin I converting enzyme (ACE), meprin A, beta (MEP1B), carnosine dipeptidase 1 (CNDP1), intercellular adhesion molecule 1 (ICAM1), transforming growth factor beta 1 (TGFB1), apolipoprotein E (APOE) and superoxide dismutase 1 (SOD1), CD48 molecule (CD48), solute carrier family 35, member F3 (SLC35F3), endothelial PAS domain protein 1 (EPAS1), low density lipoprotein-related protein 1B (deleted in tumours) (LRP1B), dynein, axonemal, heavy chain 7 (DNAH7), ADAM metallopeptidase domain 23 (ADAM23), leprecan-like1 (LEPREL1), human immunodeficiency virus type I enhancer binding protein 2 (HIVEP2), thrombospondin, type I, domain containing 7A (THSD7A), S-adenosylhomocysteine hydrolase-like 2 (AHCYL2), discs, large homolog 2 (Drosophila) (DLG2), FYVE, RhoGEF and PH domain containing 4 (FGD4), rabphilin 3A homolog (mouse) (RPH3A), citrate lyase beta like (CLYBL), protein kinase C, eta (PRKCH), epidermal growth factor receptor pathway substrate 15-like 1 (EPS15L1), cystatin 9 (testatin) (CST9), pericentrin (PCNT2), matrix metallopeptidase 9 (gelatinase B, 92 kDa gelatinase, 92 kDa type IV collagenase) (MMP9), apolipoprotein C-I (APOC1), cysteinyl-tRNA synthetase (CARS), chimerin (chimaerin) 2 (CHN2), neurocalcin delta (NCALD), ectonucleotide pyrophosphatase/phosphodiesterase 1 (ENPP1), major histocompatibility complex, class II, DR beta 1 (HLA-DRB1), interleukin 8 (IL8), pleckstrin homology domain containing, family H (with MyTH4 domain) member 2 (PLEKHH2), angiotensinogen (serpin peptidase inhibitor, Glade A, member 8) (AGT) and others, reviewed in Maeda, S: Genetics of diabetic nephropathy. Ther Adv Cardiovasc Dis 2, 363-71 (2008).

[0029] Genes and markers in type-2 diabetes and obesity are described in US patent application publication No. 2007-0292412 to Salonen et al.

[0030] Proteomic Studies

[0031] Few proteomic studies have been so far conducted with the aim of identifying biomarkers of predictive value for diabetic nephropathy. Otu et al. (Diabetes Care (2007) 30:638-543) (WO 2007/056587) performed a nested case-control study on Pima Indians that allowed for identification of a 12-peak proteomic signature that was validated on a small number of individuals. However, the study did not permit the identification of the proteins from which these peaks belong and replication in other populations is needed prior to concluding the broad applicability of these biomarkers.

[0032] Up to date, there have been dozens of genetic variants and genome regions associated or linked to myocardial infarction, both in T2D patients as well as in non-diabetics. These have been comprehensively reviewed recently (Yamada, Y, S Ichihara, T Nishida: Molecular genetics of myocardial infarction. Genomic Med 2, 7-22 (2008)) and specifically for genome-wide association studies in A Catalog of Published Genome-Wide Association Studies by The National Human Genome Research Institute (available on the world wide web at genome.gov/26525384) Johnson, A D, C J O'Donnell: An open access database of genome-wide association results. BMC Med Genet 10, 6 (2009).

### SUMMARY OF THE INVENTION

[0033] The present invention relates to previously unknown associations between T2D-related complications and various polymorphisms, genes and loci. These associated polymorphisms, genes, and loci provide basis for novel methods and kits for risk assessment, diagnosis and prognosis of T2D-related complication in a patient, among other things. In addition these polymorphisms, genes, and loci provide basis for methods and kits for novel therapies to prevent, treat and/or reduce risk of developing these complications.

[0034] A “biomarker” in the context of the present invention refers to a genetic feature such as, for example, single nucleotide polymorphism (SNP) or a short tandem repeat (STR). Other types of biomarkers include, but are not limited to, transcriptional products (such as, for example, mRNA or cDNA sequences thereof) or translational products (such as, for example, proteins or polypeptides) of genes comprising such SNPs. Representative examples of such SNPs are disclosed in Table 1, 4, 7, 10, 13, 14, 16 and 19. Polymorphic genes of the present invention comprise the genes/loci also disclosed in Table 3, 6, 9 and 12. A “biomarker” can also be a clinical or biological biomarker. Clinical or biological biomarkers include, but are not limited to, age, sex, glucose levels, age of diagnosis, diabetes duration at baseline, cigarette smoking, diastolic or systolic blood pressure, atrial fibrillation, glycated hemoglobin (HbA1_{c}), total cholesterol, HDL cholesterol, albumin/creatinine ratio, glomerular filtration rate.

[0035] In one embodiment, the biomarker is one of the SNPs listed in Table 1, 4, 7, 10, 13, 14, 16 and 19 or a SNP or a STR found to be in linkage disequilibrium to one of the SNP listed in Table 1, 4, 7, 10, 13, 14, 16 and 19.

[0036] Preferably, the biomarker is not a SNP having the RefSNP ID listed in Table 20.

[0037] In another embodiment, the biomarker is a SNP of at least one of the genes listed in table 3, 6, 9 and 12 or a STR linked to a SNP of at least one of these above genes or to a locus closely related thereto.

[0038] Preferably, the biomarker is not an SNP of a gene which is listed in Table 21.

[0039] The present invention thus provides for methods of predicting risk of complications associated with T2D, comprising detecting at least one of the SNPs listed in Table 1, 4, 7, 10, 16 and 19 or a SNP or a STR found to be in linkage disequilibrium with one or more of the SNPs listed in Table 1, 4, 7, 10, 16 and 19, or a SNP of at least one gene listed in Table 3, 6, 9 and 12 or a SNP or a STR found to be in linkage disequilibrium with a SNP of such a gene, wherein the presence of the SNP or STR in a sample of a subject (or patient) suffering from T2D indicates that said subject (or patient) is likely to develop the complication. Preferred examples of such complications include, but are not limited to, albuminuria and/or declining glomerular filtration, myocardial infarction, and/or stroke.

[0040] As used herein, “single nucleotide polymorphism,” or “SNP” is a DNA sequence variation that occurs when a nucleotide, e.g., adenine (A), thymine (I), cytosine (C), or guanine (G), in the genome sequence is altered to another nucleotide. SNPs are occasional variations in DNA sequence; the vast majority of the DNA sequence is identical among all humans. SNPs or other variants may also be found in genomic regions that do not contain genes. They represent a genomic hot spot responsible for the genetic variability among humans.

[0041] As used herein, “gene” means any amount of nucleic acid material that is sufficient to encode a transcript or protein having the function desired. Thus, it includes, but is not limited to, genomic DNA, cDNA, RNA, and nucleic acid that are otherwise genetically engineered to achieve a desired level of expression under desired conditions. Accordingly, it includes fusion genes (encoding fusion proteins), intact genomic genes, and DNA sequences fused to heterologous promoters, operators, enhancers, and/or other transcription regulating sequences. Methods and nucleic acid constructs for preparing genes for recombinant expression are well known and widely used by those of skill in the art, and thus need not be detailed here. The term refers to an entirety containing entire transcribed region and all regulatory regions of a gene. The transcribed region of a gene including all exon and intron sequences of a gene including alternatively spliced exons and introns so the transcribed region of a gene contains in addition to polypeptide encoding region of a gene also regulatory and 5′ and 3′ untranslated regions present in transcribed RNA.

[0042] The genes of the invention are listed in Table 3, 6, 9 and 12.

[0043] Preferably, the gene is not one of the genes listed in Table 21.

[0044] As used herein, an “exon” is a segment of a eukaryotic gene that encodes a sequence of nucleotides in mRNA. An exon can encode amino acids in a protein. Exons are generally adjacent to introns.

[0045] As used herein, an “intron” is a non-coding region of a eukaryotic gene that may be transcribed into an RNA molecule, but is not usually translated into amino acids. It may be excised by RNA splicing when mRNA is produced.

[0046] As used herein, a “patient” is any living animal, including, but not limited to, a human who has, or is suspected of having or being susceptible to, a disease or disorder, or who otherwise would be a subject of investigation relevant to a disease or disorder. Accordingly, a patient can be an animal that has been bred or engineered as a model for metabolic syndrome, type 2 diabetes, obesity, hypertension, atherosclerosis, or any other disease or disorder. Likewise it can be a human suffering from, or at risk of developing, a disease or disorder associated with insulin metabolism, or any other disease or disorder. Similarly, a patient can be an animal (such as an experimental animal, a pet animal, a farm animal, a dairy animal, a ranch animal, or an animal cultivated for food or other commercial use), or a human, serving as a healthy control for investigations into diseases and/or disorders, e.g., those associated with insulin metabolism.

[0047] By “reagent,” is meant any element, molecule, or compound that is present in the assay system and participates, either directly or indirectly, in the biochemical processes occurring during the performance of the method. Reagents include, but are not limited to, nucleic acids, cells, media, chemicals, compounds used to introduce nucleic acids into cells, and compounds used to generate detectable signals.

[0048] By “materials” is meant items that are used to contain and/or perform the methods of the invention, but that do not participate in any of the biochemical reactions taking place in the method. Materials include, but are not limited to, test tubes, pipettes, gels, and ultraviolet transilluminators.

[0049] A “haplotype,” as described herein, refers to any combination of genetic markers (“alleles”) usually inherited together. A haplotype can comprise two or more alleles and the length of a genome region comprising a haplotype may vary from few hundred bases up to hundreds of kilobases. As it is recognized by those skilled in the art, the same haplotype can be described differently by determining the haplotype defining alleles from different nucleic acid strands. For example, the haplotype GGC defined by the SNP markers of this invention is the same as haplotype CCG in which the alleles are determined from the other strand, or haplotype CGC, in which the first allele is determined from the other strand. The haplotypes described herein are differentially present in T2D patients with increased risk of developing one or more of the aforementioned complications. Therefore, these haplotypes have diagnostic value for risk assessment, diagnosis and prognosis of T2D-related complications. Detection of haplotypes can be accomplished by methods known in the art used for detecting nucleotides at polymorphic sites.

[0050] A nucleotide position in genome at which more than one sequence is possible in a population, is referred to herein as a “polymorphic site” or “polymorphism”. Where a polymorphic site is a single nucleotide in length, the site is referred to as a SNP. For example, if at a particular chromosomal location, one member of a population has an adenine and another member of the population has a cytosine at the same position of his or her paternal or maternal DNA molecule, then this position is a polymorphic site, and, more specifically, the polymorphic site is a SNP. Polymorphic sites may be several nucleotides in length due to insertions, deletions, conversions or translocations. Each version of the sequence with respect to the polymorphic site is referred to herein as an “allele” of the polymorphic site. Thus, in the previous example, the SNP allows for both an adenine allele and a cytosine allele. Typically, a reference nucleotide sequence is referred to for a particular polymorphism e.g. in NCBI databases (as accessible on the world-wide-web at ncbi.nlm.nih.gov). Alleles that differ from the reference are referred to as “variant” alleles. The polypeptide encoded by the reference nucleotide sequence is the “reference” polypeptide with a particular reference amino acid sequence, and polypeptides encoded by variant alleles are referred to as “variant” polypeptides with variant amino acid sequences. Nucleotide sequence variants can result in changes affecting properties of a polypeptide. These sequence differences, when compared to a reference nucleotide sequence, include insertions, deletions, conversions and substitutions: e.g. an insertion, a deletion or a conversion may result in a frame shift generating an altered polypeptide; a substitution of at least one nucleotide may result in a premature stop codon, amino acid change or abnormal mRNA splicing; the deletion of several nucleotides, resulting in a deletion of one or more amino acids encoded by the nucleotides; the insertion of several nucleotides, such as by unequal recombination or gene conversion, resulting in an interruption of the coding sequence of a reading frame; duplication of all or a part of a sequence; transposition; or a rearrangement of a nucleotide sequence, as described in detail above. Such sequence changes alter the polypeptide encoded by the genes comprising such SNPs. For example, a nucleotide change resulting in a change in polypeptide sequence can alter the physiological properties of a polypeptide dramatically by resulting in altered activity, distribution and stability or otherwise affect on properties of a polypeptide. Alternatively, nucleotide sequence variants can result in changes affecting transcription of a gene or translation of its mRNA. A polymorphic site located in a regulatory region of a gene may result in altered transcription of a gene e.g. due to altered tissue specificity, altered transcription rate or altered response to transcription factors. A polymorphic site located in a region corresponding to the mRNA of a gene may result in altered translation of the mRNA e.g. by inducing stable secondary structures to the mRNA and affecting the stability of the mRNA. Such sequence changes may alter the expression of a susceptibility gene, such as, for example, an SNP associated with the aforementioned genes.

[0051] The SNP markers of the present invention, which are disclosed in tables 1, 4, 7, 10, 13, 14, 16 and 19 have been denoted with their official reference SNP (rs) ID identification tags assigned to each unique SNP by the National Center for Biotechnological Information (NCBI). Each rs ID has been linked to specific variable alleles present in a specific nucleotide position in the human genome, and the nucleotide position has been specified with the nucleotide sequences flanking each SNP.

[0052] Although the numerical chromosomal position of a SNP may still change upon annotating the current human genome build the SNP identification information such as variable alleles and flanking nucleotide sequences assigned to a SNP will remain the same. Those skilled in the art will readily recognize that the analysis of the nucleotides present in one or more SNPs set forth in table 1, 4, 7, 10, 13, 14, 16 and 19 of this invention in an individual's nucleic acid can be done by any method or technique capable of determining nucleotides present in a polymorphic site using the sequence information assigned in prior art to the rs IDs of the SNPs listed in table 1, 4, 7, 10, 13, 14, 16 and 19 of this invention. As it is obvious in the art the nucleotides present in polymorphisms can be determined from either nucleic acid strand or from both strands.

[0053] In one embodiment, the invention relates to a method for predicting the risk of developing a complication which is albuminuria and/or declining glomerular filtration myocardial infarction, or stroke in a subject having T2D, comprising detecting in a sample obtained from said subject at least one SNP having an RefSNP ID listed in Table 1, 4, 7, 10, 16 or 19.

[0054] In a related aspect, the present invention relates to a method for predicting the risk of developing a complication which is either myocardial infarction, or stroke or albuminuria and/or declining glomerular filtration or any combination thereof in a subject having T2D, comprising detecting at least one SNP having an RefSNP ID listed of in Table 1, 4, 7, 10, 16 or 19.

[0055] In a related aspect, the present invention relates to a method for predicting the risk of developing a complication which is albuminuria and/or declining glomerular filtration myocardial infarction, or stroke in a subject having T2D, comprising detecting in a sample obtained from said subject at least one SNP having an RefSNP ID listed in Table 1, 4, 7, 10, 16 or 19, wherein said RefSNP ID is not listed in Table 20.

[0056] Determination of Repeated Sequences

[0057] The present invention also provides a method for prognosticating T2D-related complication in a subject comprising detecting short tandem repeats (STR) in linkage disequilibrium with a SNP listed in Table 1, 4, 7, 10, 16 or 19. The present invention thus provides for methods of predicting risk of complication associated with T2D, comprising detecting at least one STR found to be in linkage disequilibrium with one of the SNPs of the present invention, wherein the presence of the STR in a sample of a subject (or patient) suffering from T2D indicates that said subject (or patient) is likely to develop the complication. Preferred examples of such complications include, but are not limited to, albuminuria and/or declining glomerular filtratrion myocardial infarction, and/or stroke. Methods for determining the presence of repeated sequences in a nucleic acid sample (for example, genomic DNA) are known in the art.

[0058] As such, in a related embodiment, the present invention provides a method for prognosticating type 2 diabetes-related complication in a subject comprising detecting single tandem repeats (STR) in a nucleic acid target sequence, wherein such target sequences are contained in at least one gene from the aforementioned gene set or a locus related thereto. The nucleotide sequences contained in the genes and/or a locus related thereto are obtainable from the GENEID and/or OMIM accession numbers.

[0059] Geo-ethnic specificity. Given the density of the currently available genomic markers, it was possible to distinguish without any overlap Caucasians, Africans and Asians. However, the heterogeneity within Caucasians was not described prior to the initial filing date of the present patent application. Since then there has been several papers published describing the use of genetic variation for determination of geoethnic characteristics of an individual, e.g. Novembre, J, T Johnson, K Bryc et al.: Genes mirror geography within Europe. Nature 456, 98-101 (Nov. 6, 2008); Paschou, P, P Drineas, J Lewis et al.: Tracing sub-structure in the European American population with PCA-informative markers. PLoS Genet 4, e1000114 (Jul. 4, 2008); McEvoy, B P, G W Montgomery, A F McRae et al.: Geographical structure and differential natural selection among North European populations. Genome Res 19, 804-14 (2009). The present invention identified a composite of 14839 SNPs unrelated to complications (listed in Table 13), which allowed us to distinguish three sub-populations within Caucasians of European descent. Two of those are predominant with a west/east cline in Europe. The west type includes individuals from Ireland, Netherlands, United Kingdom but also a majority of people from Australia, Canada and New-Zealand (see FIG. 2). East type includes population from Russia, Estonia, Poland, Slovakia, Czech Republic and Hungary with German being populated by both geo-ethnic groups. In addition, Caucasians in Australia, Canada and New-Zealand include a significant admixture of the Eastern type. We have also identified a third group present as a minority in most of countries studied. Further refinement of the method allowed for identification of a composite of as few as 2 000 SNPs permitting the same (Table 14).

[0060] The geo-ethnic specificity has to be taken into account for the development of predictive tools based on genomic signatures which, as exemplified in FIG. 4, can result in higher/lower frequency of risk/protective alleles or difference in penetrance.

[0061] It is understood that the SNP markers of this invention may be associated with other polymorphisms. This allows for tagging SNPs (tagSNPs), which comprise loci that can serve as proxies for many other SNPs. The use of tagSNPs greatly improves the power of association studies as only a subset of loci needs to be genotyped while maintaining the same information and power as if one had genotyped a larger number of SNPs.

[0062] By using the name of the aforementioned gene provided in Table 3, 6, 9 and 12 those skilled in the art will readily find the nucleotide sequences of a gene and the mRNAs encoded thereby as well as amino acid sequences the encoded polypeptides.

[0063] In certain methods described herein, an individual who is at risk for a T2D-related complication is an individual in whom one or more SNPs selected from the Table 1, 4, 7, 10, 16 and 19 are identified. In other embodiment also polymorphisms or haplotypes associated to SNPs of the tables may be used in risk assessment of a T2D-related complication. The significance associated with an allele or a haplotype is measured by an odds ratio. In a further embodiment, the significance is measured by a percentage. In one embodiment, a significant risk is measured as odds ratio of 0.9 or less or at least about 1.1, including by not limited to: 0.1, 0.2, 0.3, 0.4, 0.5, 0.6, 0.7, 0.8, 0.9, 1.1, 1.2, 1.3, 1.4, 1.5, 1.6, 1.7, 1.8, 1.9, 2.0, 2.5, 3.0, 4.0, 5.0, 10.0, 15.0, 20.0, 25.0, 30.0 and 40.0. In a further embodiment, a significant increase or reduction in risk is at least about 10%, including but not limited to about 10%, 25%, 30%, 35%, 40%, 45%, 50%, 55%, 60%, 65%, 70%, 75%, 80%, 85%, 90%, 95% and 99%. In a further embodiment, a significant increase in risk is at least about 50%. It is understood however, that identifying whether a risk is medically significant may also depend on a variety of factors such as family history of hypertension, history of gestational diabetes, previously identified glucose intolerance, obesity, hypertriglyceridemia, hypercholesterolemia, elevated LDL cholesterol, low HDL cholesterol, elevated blood pressure (BP), cigarette smoking, lack of physical activity, and inflammatory components as reflected by increased C-reactive protein levels or other inflammatory markers.

[0064] “Probes” or “primers” are oligonucleotides that hybridize in a base-specific manner to a complementary strand of nucleic acid molecules. By “base specific manner” is meant that the two sequences must have a degree of nucleotide complementarity sufficient for the primer or probe to hybridize to its specific target. Accordingly, the primer or probe sequence is not required to be perfectly complementary to the sequence of the template. Non-complementary bases or modified bases can be interspersed into the primer or probe, provided that base substitutions do not inhibit hybridization. The nucleic acid template may also include “non-specific priming sequences” or “nonspecific sequences” to which the primer or probe has varying degrees of complementarity. Probes and primers may include modified bases as in polypeptide nucleic acids. Probes or primers typically comprise about 15 to 30 consecutive nucleotides present e.g. in human genome and they may further comprise a detectable label, e.g., radioisotope, fluorescent compound, enzyme, or enzyme co-factor. Probes and primers to a SNP marker disclosed in table 1, 4, 7, 10, 16 and 19 are available in the art or can easily be designed using the flanking nucleotide sequences assigned to a SNP rs ID and standard probe and primer design tools.

[0065] Primers and probes for SNP markers disclosed in Table 1, 4, 7, 10, 16 and 19 can be used in risk assessment as well as molecular diagnostic methods and kits of this invention.

[0066] The invention comprises polyclonal and monoclonal antibodies that bind to a polypeptide encoded by a gene listed in table 3, 6, 9 or 12 or comprising a SNP set forth in Table 1, 4, 7, 10, 16 or 19 of the invention. The term “antibody” as used herein refers to immunoglobulin molecules or their immunologically active portions that specifically bind to an epitope (antigen, antigenic determinant) present in a polypeptide or a fragment thereof, but does not substantially bind other molecules in a sample, e.g., a biological sample, which contains the polypeptide. Examples of immunologically active portions of immunoglobulin molecules include F(ab) and F(ab′)₂ fragments which can be generated by treating the antibody with an enzyme such as pepsin. The term “monoclonal antibody” as used herein refers to a population of antibody molecules that are directed against a specific epitope and are produced either by a single clone of B cells or a single hybridoma cell line. Polyclonal and monoclonal antibodies can be prepared by various methods known in the art. Additionally, recombinant antibodies, such as chimeric and humanized monoclonal antibodies, comprising both human and non-human portions, can be produced by recombinant DNA techniques known in the art. Antibodies can be coupled to various enzymes, prosthetic groups, fluorescent materials, luminescent materials, bioluminescent materials, or radioactive materials to enhance detection.

[0067] In a related embodiment, the present invention also provides for the use of antisense oligonucleotides or silencing RNAs or similar methods which are capable of modulating the expression and/or levels of a product (i.e., mRNA or polypeptide) of a gene comprising a SNP set forth in Table 1, 4, 7, 10, 16 or 19. In a particularly preferred embodiment, the antisense molecules silencing RNAs or similar methods of the present invention are useful directed against the primary transcript (i.e., mRNA) of the genes listed in Table 3, 6, 9 and 12 or comprising a SNP set forth in Table 1, 4, 7, 10, 16 or 19. Techniques for the design and use of antisense molecules or silencing RNAs or similar methods, for example, in in vitro and/or in vivo applications, are known in the art.

[0068] “A T2D-related complication” in the context of this invention refers to glucose intolerance, insulin resistance, metabolic syndrome, obesity, a microvascular complication of T2D such as retinopathy, nephropathy or neuropathy, or a macrovascular complication such as coronary heart disease, cerebrovascular disease, congestive heart failure, claudication or other clinical manifestation of atherosclerosis or arteriosclerosis.

[0069] Preferred types of “T2D-related complications” include, but are not limited to, cardiovascular diseases, retinopathy, neuropathy, and/or nephropathy.

[0070] Particularly preferred “T2D-related complications” include, but are not limited to, myocardial infarction, stroke, albuminuria and/or declining glomerular filtration

[0071] An antibody specific for a polypeptide encoded by a gene identified in table 3, 6, 9 or 12 or containing a SNP listed in table 1, 4, 7, 10, 16 or 19 of the invention can be used to detect the polypeptide in a biological sample in order to evaluate the abundance and pattern of expression of the polypeptide. Antibodies can be used diagnostically to monitor protein levels in tissue such as blood as part of a test predicting the susceptibility to complications, such as, for example, myocardial infarction, stroke and/or albuminuria and/or declining glomerular filtration or as part of a clinical testing procedure, e.g., to, for example, determine the efficacy of a given treatment regimen. Highly purified antibodies (e.g. monoclonal humanized antibodies specific to a polypeptide encoded by an associated gene of the invention and/or polymorphic gene may be produced using GMP-compliant manufacturing processes known in the art. These “pharmaceutical grade” antibodies can be used in novel therapies modulating activity and/or function of a polypeptide encoded the associated gene(s) disclosed herein.

[0072] This invention provides information on genomic markers that can be used to develop methods, reagents and kits useful to predict diabetes complications. Development of such methods, reagents and kits relies on methods known to those skilled in the art, including without limitation allele specific PCR amplification or detection of such alleles, with or without prior amplification, with allele specific probes, and DNA sequencing. Information on genomic DNA sequences from which PCR primers, hybridization probes, and sequencing primers can designed can be found in public databases using the rs ID provided for each SNP in Table 1, 4, 7, 10, 13, 14, 16 and 19.

[0073] Diagnostic Methods and Test Kits

[0074] One major application of the current invention is diagnosing a susceptibility to T2D related complications. The risk assessment methods and test kits of this invention can be applied to any diabetic patient as a screening or predisposition test, although the methods and test kits are also be applied to prediabetic patients and other subjects, preferably those with high-risk individuals (who have e.g. family history of T2D, history of gestational diabetes, previous glucose intolerance, obesity or any combination of these). Diagnostic tests that define genetic factors contributing to T2D complications might be used together with or independent of the known clinical risk factors to define an individual's risk relative to the general population. Better means for identifying those individuals susceptible for a T2D-related complication should lead to better preventive and treatment regimens, including more aggressive management of the risk factors for a T2D-related complication such as obesity, lack of physical activity, hypercholesterolemia, elevated LDL cholesterol, low HDL cholesterol, elevated BP, cigarette smoking and inflammatory components as reflected by increased C-reactive protein levels or other inflammatory markers. Physicians may use the information on genetic risk factors to convince particular patients to adjust their life style e.g. to stop smoking, to reduce caloric intake or to increase exercise.

[0075] In one embodiment of the invention, diagnosis of a susceptibility to T2D related complication in a subject is made by detecting one or more SNP markers disclosed in table 1, 4, 7, 10, 16 and 19 of this invention in the subject's nucleic acid. The presence of assessed SNP markers or haplotypes in individual's genome indicates subject's increased risk for said T2D related complication. The invention also pertains to methods of diagnosing a susceptibility to said complication in an individual comprising detection of a haplotype in a genetic aspect that is more frequently present in an individual having a T2D complication (affected), compared to the frequency of its presence an individual not having a T2D complication (control), wherein the presence of the haplotype is indicative of a susceptibility to T2D-related complication. A haplotype may be associated with a reduced rather than increased risk of said complication, wherein the presence of the haplotype is indicative of a reduced risk of T2D-related complication.

[0076] In other embodiment of the invention, diagnosis of susceptibility to T2D-related complication, is done by detecting in the subject's nucleic acid one or more polymorphic sites which are in linkage disequilibrium with one or more SNP markers disclosed in table 1, 4, 7, 10, 16 and 19 of this invention. For a therapeutic purpose, the most useful polymorphic sites are those altering the biological activity of a polypeptide encoded by a T2D related complication gene set forth in Table 3, 6, 9 or 12. Examples of such functional polymorphisms include, but are not limited to frame shifts; premature stop codons, amino acid changing polymorphisms and polymorphisms inducing abnormal mRNA splicing. Nucleotide changes resulting in a change in polypeptide sequence in many cases alter the physiological properties of a polypeptide by resulting in altered activity, distribution and stability or otherwise affect on properties of a polypeptide. Other useful polymorphic sites are those affecting transcription of a gene set forth in Table 3, 6, 9 or 12 or comprising a SNP listed in table 1, 4, 7, 10, 16, or 19 or translation of its mRNA due to altered tissue specificity, due to altered transcription rate, due to altered response to physiological status, due to altered translation efficiency of the mRNA and due to altered stability of the mRNA. The presence of nucleotide sequence variants altering the polypeptide structure and/or expression in said associated genes in individual's nucleic acid is diagnostic for susceptibility to T2D-related complication but for a diagnostic purpose, the variant may also be included in uncharted areas of the genome.

[0077] In diagnostic assays determination of the nucleotides present in one or more SNP markers of this invention, as well as polymorphic sites associated therewith can be done by any method or technique which can accurately determine nucleotides present in a polymorphic site. Numerous suitable methods have been described in the art. These methods include, but are not limited to, hybridization assays, ligation assays, primer extension assays, enzymatic cleavage assays, chemical cleavage assays and any combinations of these assays. The assays may or may not include PCR, solid phase step, a microarray, modified oligonucleotides, labeled probes or labeled nucleotides and the assay may be multiplex or singleplex. As it is obvious in the art the nucleotides present in a polymorphic site can be determined from either nucleic acid strand or from both strands.

[0078] In another embodiment of the invention, a susceptibility to a T2D-related complication is assessed from transcription products of one or more associated genes. Qualitative or quantitative alterations in transcription products can be assessed by a variety of methods described in the art, including e.g. hybridization methods, enzymatic cleavage assays, RT-PCR assays and microarrays. A test sample from an individual is collected and the alterations in the transcription of associated genes are assessed from the RNA molecules present in the sample. Altered transcription is diagnostic for a susceptibility to a T2D-related complication.

[0079] In another embodiment of the invention, diagnosis of a susceptibility to T2D-related complication is made by examining expression, abundance, biological activities, structures and/or functions of polypeptides encoded by one of the gene disclosed in Table 3, 6, 9 or 12. A test sample from an individual is assessed for the presence of alterations in the expression, biological activities, structures and/or functions of the polypeptides, or for the presence of a particular polypeptide variant (e.g., an isoform) encoded by a gene disclosed in Table 3, 6, 9 or 12. An alteration can be, for example, quantitative (an alteration in the quantity of the expressed polypeptide, i.e., the amount of polypeptide produced) or qualitative (an alteration in the structure and/or function of a polypeptide encoded by the polymorphic genes could be measured. Alterations in expression, abundance, biological activity, structure and/or function of polypeptides encoded by such polymorphic genes can be determined by various methods known in the art e.g. by assays based on chromatography, spectroscopy, colorimetry, electrophoresis, isoelectric focusing, specific cleavage, immunologic techniques and measurement of biological activity as well as combinations of different assays. An “alteration” in the polypeptide expression or composition, as used herein, refers to an alteration in expression or composition in a test sample, as compared with the expression or composition in a control sample and an alteration can be assessed either directly from the polypeptide itself or its fragment or from substrates and reaction products of said polypeptide. A control sample is a sample that corresponds to the test sample (e.g., is from the same type of cells), and is from an individual who is not affected by a T2D complication. An alteration in the expression, abundance, biological activity, function or composition of a polypeptide encoded by a polymorphic gene of the invention in the test sample, as compared with the control sample, is indicative of a susceptibility to developing complications. In another embodiment, assessment of the splicing variant or isoform(s) of a polypeptide encoded by a polymorphic gene can be performed directly (e.g., by examining the polypeptide itself), or indirectly (e.g., by examining the mRNA encoding the polypeptide, such as through mRNA profiling).

[0080] Yet in another embodiment, a susceptibility to a T2D-related complication can be diagnosed by assessing the status and/or function of biological networks and/or metabolic pathways related to one or more polypeptides encoded by a T2D-related complication risk gene of this invention. Status and/or function of a biological network and/or a metabolic pathway can be assessed e.g. by measuring amount or composition of one or several polypeptides or metabolites belonging to the biological network and/or to the metabolic pathway from a biological sample taken from a subject. Risk to develop said complication is evaluated by comparing observed status and/or function of biological networks and or metabolic pathways of a subject to the status and/or function of biological networks and or metabolic pathways of healthy controls.

[0081] Another major application of the current invention is diagnosis of a molecular subtype of a type II diabetic patient. Molecular diagnosis methods and kits of this invention can be applied to a person having type II diabetes. In one preferred embodiment, molecular subtype of T2D in an individual is determined to provide information of the molecular etiology of T2D. When the molecular etiology is known, better diagnosis and prognosis of T2D can be made and efficient and safe therapy for treating T2D-related complications in an individual can be selected on the basis of this genetic subtype. For example, a drug that is likely to be effective, for example, a blood glucose lowering agent, can be selected without trial and error. Physicians may use the information on genetic risk factors with or without known clinical risk factors to convince particular patients to adjust their life style and manage T2D risk factors and select intensified preventive and curative interventions for them. In other embodiment, biomarker information obtained from methods and kits of the present invention are used to select human subjects for clinical trials testing anti-diabetic drugs. The kits provided for diagnosing a molecular subtype of T2D in an individual comprise wholly or in part protocol and reagents for detecting one or more biomarkers and interpretation software for data analysis and T2D molecular subtype assessment.

[0082] The diagnostic assays and kits of the invention may further comprise a step of combining non-genetic information with the biomarker data to make risk assessment, diagnosis or prognosis of a T2D-related complication. Useful non-genetic information comprises, without limitations, are age, gender, smoking status, physical activity, waist-to-hip circumference ratio (cm/cm), the subject family history of T2D or obesity, history of gestational diabetes, previously identified glucose intolerance, obesity, hypertriglyceridemia, low HDL cholesterol, HT and particularly elevated BP and/or status of being hypertensive. The detection method of the invention may also further comprise a step determining blood, serum or plasma glucose, total cholesterol, HDL cholesterol, LDL cholesterol, triglyceride, apolipoprotein B and AI, fibrinogen, ferritin, transferrin receptor, C-reactive protein, serum or plasma insulin concentration.

[0083] The score that predicts the probability of developing a T2D-related complication may be calculated using art-known procedures including but not limited to logistic regression, support vector machines and neural networks. The results from the further steps of the method as described below render possible a step of calculating the probability of developing such T2D-related complication using a logistic regression equation. Alternative statistical models include, but are not limited to, Cox's proportional hazards' model, other iterative models and neural networking models.

[0084] Diagnostic test kits (e.g. reagent kits) of this invention comprise reagents, materials and protocols for assessing one or more biomarkers, and instructions and software for comparing the biomarker data from a subject to biomarker data from healthy and diseased people to make risk assessment, diagnosis or prognosis of a T2D related complication and optimized therapeutic suggestions. Useful reagents and materials for kits include, but are not limited to PCR primers, hybridization probes and primers as described herein (e.g., labeled probes or primers), allele-specific oligonucleotides, reagents for genotyping SNP markers, reagents for detection of labeled molecules, restriction enzymes (e.g., for RFLP analysis), DNA polymerases, RNA polymerases, DNA ligases, marker enzymes, antibodies which bind to altered or to non-altered (native) a polypeptide, means for amplification of nucleic acids fragments from one or more SNPs selected from the table 1, 4, 7, 10, 13, 14, 16 or 19, means for analyzing the nucleic acid sequence of one or more T2D-complication related SNPs, or means for analyzing the sequence of one or more amino acid residues of polypeptides encoded by genes comprising such SNPs, etc. In one embodiment, a kit for diagnosing susceptibility to a T2D-related complication comprises primers and reagents for detecting the nucleotides present in one or more SNP markers selected from the table 1, 4, 7, 10, 16 or 19 in individual's nucleic acid.

[0085] Methods of Therapy

[0086] The present invention discloses novel methods for the prevention and treatment of a T2D-related complication. In particular, the invention relates to methods of treatment of T2D-related complications. The term, “treatment” as used herein, refers not only to ameliorating symptoms associated with the disease, but also preventing or delaying the onset of the complication, and also lessening the severity or frequency of symptoms of the disease, preventing or delaying the occurrence of a second episode of the disease or condition; and/or also lessening the severity or frequency of symptoms of the disease or condition.

[0087] The present invention encompasses methods of treatment (prophylactic and/or therapeutic) for a T2D-related complication using a therapeutic agent. A “therapeutic agent” is an agent that alters (e.g., enhances or inhibits) enzymatic activity or function of a risk gene such as those disclosed in Table 3, 6, 9 and 12 and/or expression of polymorphisms disclosed in table 1, 4, 7, 10, 16 and 19 and/or the specific metabolic or other biologically related pathway implicating those genes. The modes of useful therapeutic agents are further disclosed.

[0088] Representative therapeutic agents of the invention comprise the following: (a) nucleic acids, fragments, variants or derivatives of the genes, nucleic acids, or an active fragment or a derivative thereof and nucleic acids modifying the expression of said genes (e.g. antisense polynucleotides, catalytically active polynucleotides (e.g. ribozymes and DNAzymes), molecules inducing RNA interference (RNAi) and micro RNA), and vectors comprising said nucleic acids; (b) polypeptides, active fragments, variants or derivatives thereof, binding agents of polypeptides; peptidomimetics; fusion proteins or prodrugs thereof, antibodies; (c) metabolites of the gene products; (d) small molecules and compounds that alter (e.g., inhibit or antagonize) a risk gene expression, activity and/or function of a polypeptide encoded by said genes and; (e) small molecules and compounds that alter (e.g. induce, agonize or modulate) the expression or activity of said genes.

[0089] The nucleic acid sequences of T2D-related complication associated risk genes such as those disclosed in Table 3, 6, 9 and 12 and/or polymorphisms disclosed in table 1, 4, 7, 10, 16 and 19 of this application are publicly available and can be used to design and develop therapeutic nucleic acid molecules and recombinant DNA molecules for the prevention and treatment of T2D or a T2D related condition. For example antisense nucleic acid molecules targeted to a polymorphism in tables 1, 4, 7, 10, 16 and 19 can be designed using tools and the nucleotide sequence of the gene available in the art and constructed using chemical synthesis and/or enzymatic ligation reactions using procedures known in the art. Antisense nucleic acid molecule can be chemically synthesized using naturally occurring nucleotides or modified nucleotides designed to increase the biological stability of the molecules or to increase the physical stability of the duplex formed between the antisense oligonucleotide and sense nucleic acids, e.g., phosphorothioate derivatives and acridine substituted nucleotides can be used.

[0090] Alternatively, the antisense nucleic acid molecule can be produced biologically using an expression vector into which a nucleic acid molecule encoding a T2D-related complication risk gene, a fragment or a variant thereof has been cloned in antisense orientation (i.e., RNA transcribed from the expression vector will be complementary to the transcribed RNA of a T2D-related complication risk gene of interest).

[0091] More than one T2D-related complication therapeutic agent can be used concurrently, if desired. The therapy is designed to affect 1) expression of a T2D-related complication gene in a sense of activation, inhibition or modulation, 2) abundance, stability, biological activity and/or function of a T2D-related complication risk gene-encoded ribonucleic acid or polypeptide, or 3) biological activity and/or function of a T2D-related complication gene related signaling or metabolic pathway. Upregulation or increasing expression of a T2D-related complication risk gene or a particular variant of a T2D-related complication 4, 7, 10, 16 and 19 susceptibility gene could interfere with or compensate for the expression or activity of a defective gene or variant; downregulation or decreasing expression or availability of a native risk gene or a particular splicing variant of a T2D-related complication susceptibility gene could minimize the expression or activity of a defective gene or the particular variant and thereby minimize the impact of the defective gene or the particular variant.

[0092] The T2D and T2D-related complication therapeutic agent(s) are administered in a therapeutically effective amount that can be determined using established clinical methods and assays. The precise dose to be employed in the formulation will also depend on the route of administration, and the seriousness of the disease or disorder, and should be decided according to the judgment of a practitioner. Effective doses may be extrapolated from dose-response curves derived from in vitro or animal model test systems.

[0093] In one embodiment, a nucleic acid encoding a T2D-related complication polypeptide, fragment, variant or derivative thereof, either by itself or included within a vector, can be introduced into cells of an individual affected by T2D or a T2D related condition using variety of experimental methods described in the art, so that the treated cells start to produce native T2D-related complication susceptibility polypeptide. Thus, cells which, in nature, lack of a native T2D-related complication risk gene expression and activity, or have abnormal T2D-related complication risk gene expression and activity, can be engineered to express a T2D-related complication polypeptide or an active fragment or a different variant of said T2D-related complication susceptibility polypeptide. Genetic engineering of cells may be done either “ex vivo” (i.e. suitable cells are isolated and purified from a patient and re-infused back to the patient after genetic engineering) or “in vivo” (i.e. genetic engineering is done directly to a tissue of a patient using a vehicle). Alternatively, in another embodiment of the invention, a nucleic acid (e.g. a polynucleotide) which specifically hybridizes to the mRNA and/or genomic DNA of a T2D-related complication gene is administered in a pharmaceutical composition to the target cells or said nucleic acid is generated “in vivo”. The antisense nucleic acid that specifically hybridizes to the mRNA and/or DNA inhibits expression of the T2D-related complication polypeptide, e.g., by inhibiting translation and/or transcription. Binding of the antisense nucleic acid can be due to conventional base pairing, or, for example, in the case of binding to DNA duplexes, through specific interaction in the major groove of the double helix. In a preferred embodiment nucleic acid therapeutic agents of the invention are delivered into cells that express one or more T2D-related complication risk genes. A number of methods including, but not limited to, the methods known in the art can be used for delivering a nucleic acid to said cells. For example, a vector can be introduced in vivo such that it is taken up by a cell and directs the transcription of a RNA molecule, which induces RNA interference in the cell. Such a vector can remain episomal or become chromosomally integrated, and as long as it can be transcribed to produce the desired RNA molecules it will modify the expression of a T2D-related complication risk gene. Such vectors can be constructed by various recombinant DNA technology methods standard in the art.

[0094] The expression of an endogenous T2D-related complication risk gene can be reduced by inactivating completely (“knocking out”) or partially (“knocking down”) a T2D-related complication gene using targeted homologous recombination methods described in the art. Alternatively, expression of a functional, non-mutant T2D-related complication can be increased using a similar method: targeted homologous recombination can be used to replace a non-functional T2D-related complication risk gene with a functional form of the said gene in a cell. In another embodiment of the invention, other T2D therapeutic agents as described herein can also be used in the treatment or prevention of T2D or a related condition. The therapeutic agents can be delivered in a pharmaceutical composition; they can be administered systemically, or can be targeted to a particular tissue. The therapeutic agents can be produced by a variety of means, including chemical synthesis, cell culture and recombinant techniques (e.g. with transgenic cells and animals). Therapeutic agents can be isolated and purified to fulfill pharmaceutical requirements using standard methods described in the art. A combination of any of the above methods of treatment (e.g., administration of non-mutant T2D-related complication susceptibility polypeptide in conjunction with RNA molecules inducing RNA interference targeted to the mutant T2D-related complication susceptibility mRNA) can also be used.

[0095] In the case of pharmaceutical therapy the invention comprises compounds which affect 1) expression of a T2D-related complication gene in a sense of activation, inhibition or modulation, 2) abundance, stability, biological activity and/or function of a T2D-related complication risk gene-encoded ribonucleic acid or polypeptide, or 3) biological activity and/or function of a T2D-related complication gene or metabolic pathway encoded by T2D complication-associated risk genes such as those disclosed in Table 3, 6, 9 and 12 and/or polymorphisms disclosed in table 1, 4, 7, 10, 16 and 19 of this application. The treatment may also exert its effects as specified above on one or several genes selected from the T2D complication-associated risk genes such as those disclosed in Table 3, 6, 9 and 12 and/or polymorphisms disclosed in table 1, 4, 7, 10, 16 and 19 of this application.

[0096] Furthermore, a disclosed method or a test based on biomarkers specific for T2D-related complication susceptibility gene is useful in selection, modification or optimalization of therapeutic modalities for T2D-patients. For example if the less frequent, i.e. the minor, assumable mutated allele in the T2D-related complication susceptibility gene is risk-reducing, and if said mutation is a gene function reducing mutation, one can deduce that the gene function and/or activity would increase the risk of T2D complication. On that basis, drugs and other therapies such as gene therapies that reduce or inhibit the function or activity of the T2D-related complication susceptibility gene or the encoded protein would reduce the risk of the said T2D-related complication and could be used to both prevent and treat the said T2D-related complication in subjects having said mutated allele.

[0097] In another embodiment of the invention a T2D or T2D-related complication therapeutic agent comprises a known therapeutic agent related to a T2D-related complication associated gene listed in tables 3, 6, 9 or 12 of this invention but which is not used to treat T2D or a T2D-related complication. Such compounds and therapeutic agents are useful for developing new therapies for T2D or a T2D-related complication as they most likely affect 1) expression of a T2D-related complication gene in a sense of activation, inhibition or modulation, 2) abundance, stability, biological activity and/or function of a T2D-related complication risk gene-encoded ribonucleic acid or polypeptide, or 3) biological activity and/or function of a T2D-related complication gene related signaling or metabolic pathway. These agents may be used alone or in combination with other treatments and agents used for prevention or treatment of T2D or a T2D-related condition.

[0098] In one embodiment of the invention, therapeutic agents or compounds currently utilized for the treatment of T2D and T2D-related complications are combined with one or more known therapeutic agents used to treat T2D comprising I. oral antidiabetics including biguanid derivatives such as 1) metformin, 2) buformin, insulin secretagogues such as 1) sulphonylurea derivatives such as tolbutamide, glibenclamide, gliclazide, glipizide glimepiride, gliquidone; 2) meglitinides such as repaglinide, nateglinide; 3) alpha-glucosidase inhibitors such as acarbose, miglitol; 4) thiazolidinediones such as rosiglitazone and pioglitazone; 5) other defined by World Health Organisation—The Anatomical Therapeutic Chemical (ATC) classification system; II. insulin such as i) insulin glargine, ii) insulin aspart, iii) insulin lispro, iv) insulin glulisine; v) insulin detemir; and agents known do decrease and or prevent diabetes related complication, such as high blood pressure, i) converting enzyme inhibitors, ii) angiotensin receptor blockers, iii) direct renin inhibitors, iv) endothelin antagonists, v) diuretics, vi) beta blockers, vii) alpha blockers, viii) inhibitors of phosphodiesterase 5a and the combinations thereof.

[0099] Pharmaceutical Compositions

[0100] The present invention also pertains to pharmaceutical compositions comprising agents described herein, particularly polynucleotides, polypeptides and any fractions, variants or derivatives of T2D-related complication genes, and/or agents that alter (e.g., enhance or inhibit) expression of a risk gene or genes, or activity of one or more polypeptides encoded by associated genes as described herein. For instance, an agent that alters expression of a risk gene or activity of one or more polypeptides encoded thereby.

[0101] Agents described herein can be formulated as neutral or salt forms. Pharmaceutically acceptable salts include those formed with free amino groups such as those derived from hydrochloric, phosphoric, acetic, oxalic, tartaric acids, etc., and those formed with free carboxyl groups such as those derived from sodium, potassium, ammonium, calcium, ferric hydroxides, isopropylamine, triethylamine, 2-ethylamino ethanol, histidine, procaine, etc. Suitable pharmaceutically acceptable carriers include but are not limited to water, salt solutions (e.g., NaCl), saline, buffered saline, alcohols, glycerol, ethanol, gum arabic, vegetable oils, benzyl alcohols, polyethylene glycols, gelatin, carbohydrates such as lactose, amylose or starch, dextrose, magnesium stearate, talc, silicic acid, viscous paraffin, perfume oil, fatty acid esters, hydroxymethylcellulose, polyvinyl pyrolidone, etc., as well as combinations thereof. The pharmaceutical preparations can, if desired, be mixed with auxiliary agents, e.g., lubricants, preservatives, stabilizers, wetting agents, emulsifiers, salts for influencing osmotic pressure, buffers, coloring, flavoring and/or aromatic substances and the like which do not deleteriously react with the active agents.

[0102] The composition, if desired, can also contain minor amounts of wetting or emulsifying agents, or pH buffering agents. The composition can be a liquid solution, suspension, emulsion, tablet, pill, capsule, sustained release formulation, or powder. The composition can be formulated as a suppository, with traditional binders and carriers such as triglycerides. Oral formulation can include standard carriers such as pharmaceutical grades of mannitol, lactose, starch, magnesium stearate, polyvinyl pyrolidone, sodium saccharine, cellulose, magnesium carbonate, etc.

[0103] Methods of introduction of these compositions include, but are not limited to, intradermal, intramuscular, intraperitoneal, intraocular, intravenous, subcutaneous, topical, oral and intranasal. Other suitable methods of introduction can also include gene therapy (as described below), rechargeable or biodegradable devices, particle acceleration devises (“gene guns”) and slow release polymeric devices. The pharmaceutical compositions of this invention can also be administered as part of a combinatorial therapy with other agents. The composition can be formulated in accordance with the routine procedures as a pharmaceutical composition adapted for administration to human beings. For example, compositions for intravenous administration typically are solutions in sterile isotonic aqueous buffer. Where necessary, the composition may also include a solubilizing agent and a local anesthetic to ease pain at the site of the injection. Generally, the ingredients are supplied either separately or mixed together in unit dosage form, for example, as a dry lyophilized powder or water free concentrate in a hermetically sealed container such as an ampule or sachette indicating the quantity of active agent. Where the composition is to be administered by infusion, it can be dispensed with an infusion bottle containing sterile pharmaceutical grade water, saline or dextrose/water. Where the composition is administered by injection, an ampule of sterile water for injection or saline can be provided so that the ingredients may be mixed prior to administration. For topical application, nonsprayable forms, viscous to semi-solid or solid forms comprising a carrier compatible with topical application and having a dynamic viscosity preferably greater than water, can be employed. Suitable formulations include but are not limited to solutions, suspensions, emulsions, creams, ointments, powders, enemas, lotions, sols, liniments, salves, aerosols, etc., which are, if desired, sterilized or mixed with auxiliary agents, e.g., preservatives, stabilizers, wetting agents, buffers or salts for influencing osmotic pressure, etc. The agent may be incorporated into a cosmetic formulation. For topical application, also suitable are sprayable aerosol preparations wherein the active ingredient, preferably in combination with a solid or liquid inert carrier material, is packaged in a squeeze bottle or in admixture with a pressurized volatile, normally gaseous propellant, e.g., pressurized air.

[0104] The agents are administered in a therapeutically effective amount. The amount of agents which will be therapeutically effective in the treatment of a particular disorder or condition will depend on the nature of the disorder or condition, and can be determined by standard clinical techniques. In addition, in vitro or in vivo assays may optionally be employed to help identify optimal dosage ranges. The precise dose to be employed in the formulation will also depend on the route of administration, and the seriousness of the symptoms of a T2D-related complication, and should be decided according to the judgment of a practitioner and each patient's circumstances. Effective doses may be extrapolated from dose-response curves derived from in vitro or animal model test systems.

[0105] Functional Foods

[0106] By definition “functional foods” or “nutraceuticals” are foods or dietary components or food ingredients that may provide a health benefit beyond basic nutrition. Functional foods are regulated by authorities (e.g. by the FDA in US) according to their intended use and the nature of claims made on the package. Functional foods can be produced by various methods and processes known in the art including, but not limited to synthesis (chemical or microbial), extraction from a biological material, mixing functional ingredient or component to a regular food product, fermentation or using a biotechnological process. A functional food may exert its effects directly in the human body or it may function e.g. through human intestinal bacterial flora.

[0107] The associated genes disclosed in Table 3, 6, 9 and 12 of this invention can be used as molecular targets towards which functional foods claiming health benefit in a T2D related complication can be developed. For example a functional food may compensate reduced biological activity of a polypeptide encoded by a gene set forth in Table 3, 6, 9 or 12 when the risk gene is defective or is not expressed properly in a subject. A functional food may also inhibit the expression and/or biological activity of a gene or polypeptide of the invention promoting the development of a T2D related complication. In another embodiment a functional food may increase the expression and/or biological activity of a gene or polypeptide protecting an individual from the development of a T2D related complication due to reduced expression and protein production.

[0108] Aspects of the instant invention include, but are not limited to:

Aspect 1. A method for predicting a risk of developing a complication which is myocardial infarction, stroke, or albuminuria and/or declining glomerular filtratrion in a subject affected by T2D, comprising detecting, in a sample obtained from said subject, at least one genetic feature which is single nucleotide polymorphism (SNP), short tandem repeat (STR),

[0109] wherein the detection of said genetic feature in said subject correlates with said risk of developing at least one of said complication.

Aspect 2. The method according to aspect 1, wherein said SNP comprises a polymorphism of a gene or a locus linked thereto.
Aspect 3. The method according to aspect 1, wherein said genetic feature comprises at least one feature listed in Table 1, 4, 7, 10, 16 or 19.
Aspect 4. The method according to aspect 1, wherein said genetic feature is at least one SNP listed in Table 1, 4, 7, 10, 16 or 19.
Aspect 5. The method according to aspect 1, wherein said genetic feature is at least one SNP or one STR found to be in linkage disequilibrium with a SNP listed in Table 1, 4, 7, 10, 16 or 19.
Aspect 6. The method according to aspect 1, comprising detecting a SNP or a STR of at least one gene which is listed in Table 3, 6, 9 or 12.
Aspect 7. The method according to aspect 1, wherein detection of said genetic feature correlates with increased or reduced risk of developing said complication.
Aspect 8. A method for predicting a risk of developing a complication which is myocardial infarction, stroke, or albuminuria and/or declining glomerular filtration in a subject affected by type II diabetes, comprising detecting, in a sample obtained from said subject, at least one single nucleotide polymorphism (SNP) from the SNPs listed in Table 1, 4, 7, 10, 16 or 19, or at least one SNP or one TR found to be in linkage disequilibrium with at least one SNP listed in Table 1, 4, 7, 10, 16 or 19, wherein the detection of said SNP or STR in said subject correlates with said risk of developing said complication.
Aspect 9. A method for predicting a risk of developing a complication which is myocardial infarction, stroke, or albuminuria and/or declining glomerular filtration in a subject affected by T2D, comprising detecting, in a sample obtained from said subject, at least one (SNP) from at least on gene listed in Table 3, 6, 9 or 12 or at least one STR found to be in linkage disequilibrium with at least one (SNP) from at least one gene listed in Table 3, 6, 9 or 12, wherein the detection of said SNP or STR in said subject correlates with said risk of developing said complication.
Aspect 10: A method for predicting the risk of developing a complication which is myocardial infarction, stroke, albuminuria and/or declining glomerular filtration or any combination thereof in a subject having type II diabetes, comprising detecting at least one SNP from the list of SNPs of Table 1, 4, 7, 10, 16 or 19, said SNP being selected on the basis of its p value of association with said complication(s), allele frequency and odds ratio.
Aspect 11. The method according to aspects 8 or 9 or 10, comprising detecting at least two SNPs.
Aspect 12. The method according to aspects 8 or 9 or 10, comprising detecting at least three SNPs.
Aspect 13. The method according to aspects 8 or 9 or 10, comprising detecting more than three SNPs
Aspect 14. The method according to aspects 8 or 9 or 10, wherein said STR and/or SNP is detected in said patient in a specific geo-ethnic context.
Aspect 15: The method of aspect 14, wherein the geoethnic origin of an individual is determined using SNPs selected from the SNPs listed in Table 13 or 14.
Aspect 16. The method according to aspect 1, wherein the genetic feature is
[0110] (a) at least one single nucleotide polymorphism (SNP) listed in Table 16 or 19;
[0111] (b) at least one SNP which is in linkage disequilibrium with at least one SNP of (a); or
[0112] (c) short tandem repeat (STR) that is in linkage disequilibrium with at least one SNP of (a).
   Aspect 17. The method according to Aspect 16, comprising detecting at least two SNPs from the SNPs listed in Table 16 or 19.
   Aspect 18. The method according to Aspect 16, comprising detecting at least three SNPs from the SNPs listed in Table 16 or 19.
   Aspect 19. The method according to aspect 1, with the proviso that said at least one SNP is not one of the SNPs listed in Table 20.
   Aspect 20. The method according to aspect 2, with the proviso that said at least one gene is not one of the genes listed in Table 21.
   Aspect 21. A kit for predicting a complication which is myocardial infarction, stroke or albuminuria in a subject affected by type-2 diabetes (T2D) comprising in one or more packages
[0113] (a) an oligonucleotide that specifically hybridizes to a SNP having the RefSNP ID listed in Table 1, 4, 7, 10, 16 or 19; or
[0114] (b) an oligonucleotide which is the complement of (a);
   and one or more reagents for the detection of said oligonucleotide.
   Aspect 22. The kit according to aspect 21, comprising one or more reagents for polymerase chain reaction (PCR).
   Aspect 23. The kit of aspect 21, further comprising an RNase.
   Aspect 24. The kit of aspect 21, which further comprises one or more reagents for isolation of cells from a sample.
   Aspect 25. The kit of aspect 24, wherein said sample is a blood sample.
   Aspect 26. The kit of aspect 21, further comprising a DNAse inhibitor.
   Aspect 27. The kit of aspect 21, further comprising reagents for sequencing in one or more packages.
   Aspect 28. The kit of aspect 21, further comprising a cDNA microarray plate in one or more packages.
   Aspect 29. The kit of aspect 21, wherein the oligonucleotide comprises the probe sequences of Tables 2, 5, 8, 9, 11 and 16.
   Aspect 30. The kit of aspect 21, wherein the oligonucleotide is
   [0115] (a) an oligonucleotide comprising at least 80% sequence identity to the oligonucleotide having the RefSNP ID listed in Table 1, 4, 7, 10, 16 or 19; or
   [0116] (b) an oligonucleotide which is complimentary to the oligonucleotide of (a).
      Aspect 31. The kit of aspect 30, wherein the oligonucleotide is
   [0117] (c) an oligonucleotide comprising at least 90% sequence identity to the oligonucleotide having the RefSNP ID listed in Table 1, 4, 7, 10, 16 or 19; or
   [0118] (d) an oligonucleotide which is complimentary to the oligonucleotide of (a).
      Aspect 32. The kit of aspect 30, wherein the oligonucleotide is
   [0119] (e) an oligonucleotide comprising at least 95% sequence identity to the oligonucleotide having the RefSNP ID listed in Table 1, 4, 7, 10, 16 or 19; or
   [0120] (f) an oligonucleotide which is complimentary to the oligonucleotide of (a).
      Aspect 33. The kit of aspect 30, wherein the oligonucleotide is
   [0121] (g) an oligonucleotide comprising at least 100% sequence identity to the oligonucleotide having the RefSNP ID listed in Table 1, 4, 7, 10, 16 or 19; or
   [0122] (h) an oligonucleotide which is complimentary to the oligonucleotide of (a).
      Aspect 34. The kit of aspect 21, which further comprises a control oligonucleotide that hybridizes to the wild-type allele.
      Aspect 35. Use of a kit according to Aspect 21 for predicting a complication which is myocardial infarction, stroke, albuminuria or declining glomerular filtration in a subject affected by type-2 diabetes (T2D).
      Aspect 36. A method for preventing, treating or reducing the risk of T2D or a T2D related complication which is myocardial infarction, stroke, albuminuria or declining glomerular filtration in a subject in need thereof, comprising administrating to said subject a therapeutic agent which
[0123] (a) alters the enzymatic activity or levels of a polypeptide encoded by at least one risk gene listed in Table 3, 6, 9; or
[0124] (b) alters the expression of at least one polymorphism disclosed in table 1, 4, 7, 10, 16, or 19; or
[0125] (c) alters the specific metabolic or other biologically related pathway implicating the risk gene of (a).
   Aspect 37. The method according to aspect 36, wherein the therapeutic agent alters the expression of at least one polymorphism disclosed in table 1, 4, 7, 10, 16, or 19.
   Aspect 38. The method according to aspect 37, wherein the therapeutic agent is an antisense oligonucleotide or an siRNA.
   Aspect 39. The method according to aspect 36, wherein the therapeutic agent alters the levels or enzymatic activity of a polypeptide encoded by at least one risk gene listed in Table 3, 6, 9.
   Aspect 40. The method according to aspect 39, wherein the therapeutic agent is an antibody.
   Aspect 41. A method for identifying a subject for preventive therapeutic action, comprising detecting, in a sample obtained from said subject, at least one genetic feature which is
[0126] (a) at least one single nucleotide polymorphism (SNP) listed in Table 1, 4, 7, 10, 16 or 19;
[0127] (b) at least one SNP which is in linkage disequilibrium with at least one SNP of (a); or
[0128] (c) short tandem repeat (STR) that is in linkage disequilibrium with at least one SNP of (a),
   wherein the detection of said genetic feature in said subject correlates with the eligibility of said subject for said preventive therapeutic action.

[0129] The entire disclosures of all applications, patents and publications, cited above and below, are hereby incorporated by reference.

### BRIEF DESCRIPTION OF THE DRAWINGS AND TABLES

[0130] Various features and attendant advantages of the present invention will be more fully appreciated as the same becomes better understood when considered in conjunction with the accompanying drawings, in which like reference characters designate the same or similar parts throughout the several views, and wherein:

[0131] FIG. 1. Genetic axis of variations were constructed using two principal components based on 14961 SNPs characterized by minor allele frequency of more than 10%, with a call rate of 100%, and HWE p>0.0001 equally distributed over the genome at every 100 kb, unrelated to complications on all autosomes.

[0132] FIG. 2. Histogram of number of individuals by the three main regions defined by PCA analysis described in FIG. 1, for each country included in the dataset.

[0133] FIG. 3. Prevalence of T2D complications (albuminuria and/or declining glomerular filtratrion, stroke and MI) in each country included in the dataset.

[0134] FIG. 4 shows three-panel, Upper, prevalence of the complication, Middle, frequency of the risk allele and lower, odds ratio of risk for all individuals or individual belonging to regions 1, 2 or 3 respectively, for selected examples of SNPs and complications. The allelic odds ratio (OR) were computed for the same phenotype as the association was found. The five examples shown are for A: SNP rs466-4386, albuminuria, B:. SNP rs 7557611, complication, C: SNP rs1516093, MI, D: SNP rs7126809, stroke and E, rs9457730, albuminuria. Panels A-C show that the frequency of the risk allele is higher in region 3 which also exhibits higher prevalence of the complications while panels D and E show same frequency of the risk allele for both regions but higher odds ratio of risk in region 1 or 3. The geo-ethnic specificity has to be taken into account for the development of predictive tools based on genomic signatures.

[0135] FIG. 5: AUC scores of best associated SNPs (with imputation) and random SNPs with leave-one-out cross-validation vs. number of SNPs. In order to use all of our subjects, genotype imputation was performed with fastPHASE. The missing genotype rate par person doesn't exceed 10%.

[0136] FIG. 6: AUC scores of 4 different datasets with leave-one-out cross-validation from 50 to 250 SNPs. Set 1: Imputed genotypes. Set 2: Imputed genotypes plus random SNPs 50*└N/2┘ random SNPs, N=[1,20]. Set 3: Random SNPs. Set 4: 95 SNPs after feature selection

[0137] FIG. 7: Results of bootstrap analysis using the four models described in Example 2 (Logistic regression).

[0138] FIG. 8: Impact of the annual event rate in the control arm on the number of patients which need to be enrolled at entry of a clinical trial aimed at detecting differences between cardiovascular events in T2D patients treated or not with new medication.

[0139] Table 1: Results of whole genome association (WGA) tests for three different sample sets: all 1908 individuals and individuals belonging to region 1 and region 3 respectively. WGA tests for three different samples given the population named 1908 individuals: all individuals with and without covariate (methods=pca1 (see FIG. 1) and all respectively), and those belonging to regions 1 (method=region-1) and 3 (method=region-3). The table contains the results of WGA tests on the following phenotypes: albuminuria, myocardial infarction, stroke, and all complications combined. SNPs selected have p-value <5×10e-04. Quality filters: minor allele frequency, MAF 0.01, HWE 0.001, call rate 0.98. Determination of the risk allele for OR: If the minor allele frequency is higher in cases than in controls, the minor allele is defined as the risk allele.

[0140] Table 2: Flanking sequences of each of the SNPs listed in Table 1.

[0141] Table 3. List of all genes relevant to the whole genome association results of Table 1. The relevance here means that one on more of the SNPs listed in Table 1 are located either inside the gene (exon, intron, 5′UTR, 3′UTR) or very close to the gene—as defined by NCBI.

[0142] Table 4. Myocardial infarction SNPs. In the first column (RS_ID), the official name of SNP according to dbSNP of NCBI is given; the second column (MARSHFILED) denotes the position of SNP in cM on the respective chromosome. METHOD encompasses the association model type (linear or logistic regression) and covariates used in the model (HBP . . . hypertension, GE . . . geoethnic structure as determined by principal components 1 and two of PCA analysis, ACR . . . albumin/creatinine ratio, CRCL . . . creatinine clearance, AGE and SEX). PHENOTYPE denotes the case and control setup as described above. CHR identifies chromosomal allocation of the SNPs. P-VALUE shows the p value and OR_ALL denotes allelic odds ratio

[0143] Table 5. Flanking sequences of each of the SNPs in Table 4. The table comprises the official name of SNP according to dbSNP of NCBI (dbSNP RS ID) and the flanking sequence as retrieved from queries to Affymetrix NetAffx™ Analysis Center for the SNPs included in Table 4.

[0144] Table 6. Genes related to MI SNPs from Table 4. The table shows the official symbol (GENE_SYMBOL) and name of the genes (Gene Name) according to Human Genome Organisation Gene Nomenclature Committee for the genes relevant to the whole genome association results of 1908 individuals in Table 4. The relevance here means that one on more of the SNPs listed in Table 4 are located either inside the gene (exon, intron, 5′UTR, 3′UTR) or very close to the gene—as defined by NCBI.

[0145] Table 7. Kidney related complication (qualitative phenotypes) SNPs. In the first column (RS_ID), the official name of SNP according to dbSNP of NCBI is given; the second column (MARSHFILED) denotes the position of SNP in cM on the respective chromosome. METHOD encompasses the association model type (linear or logistic regression) and covariates used in the model (HBP . . . hypertension, GE . . . geoethnic structure as determined by principal components 1 and two of PCA analysis, AGE and SEX). PHENOTYPE denotes the case and control setup as described above. CHR identifies chromosomal allocation of the SNPs. P-VALUE shows the p value and OR_ALL denotes allelic odds ratio.

[0146] Table 8. Flanking sequences of each of the SNPs in Table 7. The table comprises the official name of SNP according to dbSNP of NCBI (dbSNP RS ID) and the flanking sequence as retrieved from queries to Affymetrix NetAffx™ Analysis Center for the SNPs included in Table 7.

[0147] Table 9. Genes related to kidney SNPs from Table 7. The table shows the official symbol (GENE_SYMBOL) and name of the genes (Gene Name) according to Human Genome Organisation Gene Nomenclature Committee for the genes relevant to the whole genome association results of 1908 individuals in Table 7. The relevance here means that one on more of the SNPs listed in Table 7 are located either inside the gene (exon, intron, 5′UTR, 3′UTR) or very close to the gene—as defined by NCBI.

[0148] Table 10. Kidney related complication (quantitative phenotypes) SNPs. In the first column (RS_ID), the official name of SNP according to dbSNP of NCBI is given; the second column (MARSHFIELD) denotes the position of SNP in cM on the respective chromosome. METHOD encompasses the association model type (linear or logistic regression) and covariates used in the model (HBP . . . hypertension, GE . . . geoethnic structure as determined by principal components 1 and two of PCA analysis, AGE and SEX). PHENOTYPE denotes the case and control setup as described above. CHR identifies chromosomal allocation of the SNPs. P-VALUE shows the p value.

[0149] Table 11. The table comprises the official name of SNP according to dbSNP of NCBI (dbSNP RS ID) and the flanking sequence as retrieved from queries to Affymetrix NetAffx™ Analysis Center for the SNPs included in Table 10.

[0150] Table 12. The table shows the official symbol (GENE_SYMBOL) and name of the genes (Gene Name) according to Human Genome Organisation Gene Nomenclature Committee for the genes relevant to the whole genome association results of 1908 individuals in Table 10. The relevance here means that one on more of the SNPs listed in Table 10 are located either inside the gene (exon, intron, 5′UTR, 3′UTR) or very close to the gene—as defined by NCBI.

[0151] Table 13: List of the SNPs used for geoethnic clustering (14,961 SNP example).

[0152] Table 14: List of the SNPs used for geoethnic clustering. (2 000 PCA set).

[0153] Table 15: Fraction of the 1904 individuals correctly classified clusters compared to baseline reference of 147691 SNPs.

[0154] Table 16: List of SNPs selected using SVM method and their flanking sequence.

[0155] Table 17: Mean area under the ROC curve (AUC) and 95% CI for the classification of major cardiovascular complications based on 1000 bootstrap iterations for two models: Only SNPs and SNPs+biomarkers.

[0156] Table 18: Mean area under the ROC curve (AUC) and 95% CI for the classification of major cardiovascular complications based on 1000 bootstrap iterations for two models: each biomarkers independently and biomarkers added one by one.

[0157] Table 19: List of SNPs selected using bootstrap method and their flanking sequence.

[0158] Table 20: List of SNPs comprised in the genes of Table 21.

[0159] Table 21: List of genes previously reported to be related to complications of T2D.

[0160] Without further elaboration, it is believed that one skilled in the art can, using the preceding description, utilize the following invention to its fullest extent. The following specific preferred embodiments are, therefore, to be construed as merely illustrative, and not limitative of the remainder of the disclosure in any way whatsoever.

[0161] In the forgoing and in the following examples, all temperatures are set forth uncorrected in degrees Celsius and, all parts and percentages are by volume, unless otherwise indicated.

[0162] Experimental Method

[0163] Over the last year several studies have reported significant associations of single nucleotide polymorphisms (SNP) using Whole Genome Scans (WGS) in several areas, including myocardial infarction and T2D, while hypertension appeared to resist genomic resolution at SNP level. Here we analyzed the micro- and macro-vascular complications in type 2 diabetics at the entry of ADVANCE study. The current analysis is restricted to Caucasians to decrease the heterogeneity. Total 1908 subjects were included in this stage of genomic sub-study of ADVANCE. WGS was accomplished using Affymetrix chips (the GeneChip® Human Mapping 500K Array Set, Affymetrix Genome-Wide Human SNP Array 5.0 and Affymetrix Genome-Wide Human SNP Array 6.0) as per their progressive availability with excellent intra complementarity.

[0164] This section describes the complete experimental method used by the inventors aiming to discover genetic determinants of complications associated with T2D based on the following main points:

1. Demographic data
2. Genetic data
3. Subject quality filters
4. Genetic data quality filters

### 5. Analyses

[0165] 6. Phenotype definitions
7. Association designs

### 1. Demographic Data

[0166] 1.1. Provenance—the demographic data is received from George Institute, Australia as Excel files via e-mail.
[0167] 1.2. Validation—the demographic data files usually correspond to blood sample shipments and they are checked against those to see if they match. Any discrepancies are recorded and reported back via e-mail.
[0168] 1.3. Compatibility—the data is further inspected for compatibility with the developed database insertion tool, as some small changes may be required:
   [0169] dates format to: yyyy-mm-dd
   [0170] patient id column name to: new_id
   [0171] single quotes replaced by double quotes
   [0172] etc
   [0173] All these modifications are logged then the files are saved as tab delimited text files for database import.
[0174] 1.4. Database insertion—the insertion is done using the PrognomixCmd (an in house developed software for interfacing with PostgreSQL and R statistical package) and phenotype insertion command files. The files, their output and the generated insertion SQL commands are logged for traceability. The data is inserted into Prognomix database into person, visit, measure, medication and medical tables.
[0175] 1.5. Insertion validation—once the data is inserted, the database is queried for several random phenotypes and the output is compared, manually, with the received Excel files.

### 2. Genetic Data

[0176] 2.1. Provenance—the genetic data is produced by the lab team using the blood samples from Australia and Affymetrix genotyping platform. Several chips are used: the GeneChip® Human Mapping 500K Array Set, Affymetrix Genome-Wide Human SNP Array 5.0 and Affymetrix Genome-Wide Human SNP Array 6.0 and the output consists of multiple data files per sample (subject):
   [0177] DAT file—contains the raw scanned image
   [0178] CEL file—the normalized image—used to calls the SNP
   [0179] XML file—contains experiment related information
   [0180] JPEG file—the normalized image compressed as a jpeg file.
   [0181] All these files are compressed and archived on DVDs.
[0182] 2.2. Sample quality check—the lab team employs a simple and fast sample quality check (DM).
[0183] 2.3. SNP call—the CEL files (one per subject) are used to call the SNP genotypes for each subject for all SNPs. We use the software provided by Affymetrix, apt-probset-genotype software (version 1.4 for 500 k chip and v1.8.5 64b for 5.0 and 6.0 chips), with default parameters corresponding to the chip type. The analysis script and application output are logged for further reference. The output consists in a huge matrix-like text file where the columns represent subjects and the lines markers (SNP) and a summary report file detailing some sample statistics as the genetically determined sex, sample call rate and global call rate. These metrics allows us to estimate the overall quality of the genotyping process. All subjects are called at once, as suggested by Affymetrix (personal communication, Nov. 16, 2007).
[0184] 2.4. Database insertion—the genetic data database insertion is a two step process: (1) the matrix-like data file is converted in one per subject data file and (2) the individual data files are imported into the database. This process is again done using a SNP insertion script and the PrognomixCmd tool. The data is inserted into snp_genotype table.
[0185] 2.5. Insertion validation—once the data is inserted, the database is queried for several random subjects and SNP then the output compared, manually, with the matrix-like SNP call file.

### 3. Subject Quality Filters

[0186] Subjects may be excluded for subsequent analyses. When the sex determined through genotyping does not match the sex provided in demographic data, a request is made to the George Institute to check the sex. If the re-checked sex matches the genotypic sex, the sex is corrected in the database and the subject is kept. However, if the re-checked sex does not match the genotypic sex, the subject is excluded from further analyses (table issues). Subjects whose genome proportion from the Caucasian ancestral population is below 80% according to the average of 5 STRUCTURE [J. P. Huelsenbeck, P. Andolfatto, Inference of Population Structure Under a Dirichlet Process Model, 2007 175:1787-1802] runs (see below) are excluded from further analyses.

### 4. Genetic Data Quality Filters

[0187] SNPs considered for further analyses must pass all the following criteria:
[0188] 4.1. Call rate—the SNP call rate threshold over all genotype subjects was set at 97%.
[0189] 4.2. Minor allele frequency (MAF)—the SNP MAF threshold over all genotyped subjects was set to 1%.
[0190] 4.3. Hardy-Weinberg equilibrium (HWE)—the HWE is computed for all subjects and for each affection separately for cases and controls. For single SNP tests like association we filter on controls HWE p-value using a threshold of 10′ when reporting results. For global analyses involving many SNPs (like principal component), we filter out SNP based on all subjects HWE p-value. The cutoff was set to 10′ for PCA implemented in EIGENSTRAT [Alkes L Price, Nick J Patterson, Robert M Plenge, Michael E Weinblatt, Nancy A Shadick, David Reich. Principal components analysis corrects for stratification in genome-wide association studies. Nature Genetics, Vol. 38, No. 8. (23 Jul. 2006), pp. 904-909.] and 10⁻⁴ for PCA implemented in R.
[0191] 4.4. Batch genotype frequency differences—since we used several different chips for genotyping, we noticed a number of SNPs which had completely different calls depending on the chip. To eliminate this situation we compared the chip genotypes frequency separately for cases and controls using a chi-square test and excluded SNPs showing p lower than 10⁻⁴.
[0192] 4.5. Less reliable SNPs—60 k SNPs were considered less performing by Affymetrix and were masked on the Affymetrix Genome-Wide Human SNP Array 5.0. Although we can access these 60 k SNPs they are filtered out.
[0193] Selected SNPs are then checked for the following:
[0194] 4.6. SNP call clustering issues—we implemented a feature in PrygnomixCmd tool which allows us to generate, store and examine the SNP call clusters for all SNPs and subjects. SNPs showing bad clusters according to the following criteria are filtered out:
   [0195] no clearly defined clusters
   [0196] only two clusters
   [0197] two clusters called very far from the third one
   [0198] two distinct clusters called the identical
   [0199] the calls assigned by algorithm different from those we'd assign by visual inspection.

### 5. Analyses

[0200] 5.1. Coarse-grain stratification—using STRUCTURE 2.2. All subjects are analysed together. 5 different sets of SNPs were used in order to assess the variability in the results due to the choice of the SNPs. Each set contains around 400 SNPs, chosen according to the following criteria: (1) on autosomes; (2) found in Perlegen, HapMap and Affymetrix data sets; (3) spaced at least 5 MB apart; (4) showing Fst >0.2 according to Perlegen (genome.perlegen.com/data); (4) same strand is used by Affymetrix and HapMap. The 210 founder HapMap subjects are included in the analysis (60 children are discarded). The following parameters are used: (1) 10,000 burnin iterations; (2) 50,000 real iterations; (3) 3 populations assumed; (4) admixture allowed; (5) no information about origin of subjects provided.
[0201] 5.2. Fine grain stratification: PCA analysis was performed using either in house developed software or the SMARTPCA module of Eigensoft (ref: Alkes L Price, Nick J Patterson, Robert M Plenge, Michael E Weinblatt, Nancy A Shadick, David Reich. Principal components analysis corrects for stratification in genome-wide association studies. Nature Genetics, Vol. 38, No. 8. (23 Jul. 2006), pp. 904-909). The two first principal components (i.e. those that explained most of the variance) were used when PCA was included as a covariate in the association analyses.
[0202] 5.3. Selection of covariates: We used Random Forest (Breiman L (2001). Random Forests, Machine Learning, 45: 5-32.) to adjust for unknown stratification or confounding factors in the reported associations by selecting covariates susceptible to inflate p-values. Random Forests is a machine learning approach based on classification and regression tree methods which offers the advantage of being robust against overfitting. Every tree is built using a bootstrap sample of all the subjects and, at each node of the tree, a random subset (parameter mtry) of all predictors (covariates) is chosen to determine the best split rather than the whole set of predictors. For each tree, approx. one third of all subjects are excluded from the bootstrap sample, also referred to as “out-of-bag” or GOB subjects, and these subjects are used to estimate prediction accuracy of the Random Forest. The Random Forest method also produces an importance measure for each predictor, which quantifies the relative contribution of each predictor to the prediction accuracy. For each phenotype, we selected covariates based on importance measures estimated from 2000 trees “grown” in the randomForest R package version 4.5-28 (Liaw A, Wiener M (2002). Classification and Regression by random Forest, R News 2(3): 18-22.). Parameter mtry was set equal to the square root of the number of predictors used to grow the forest (default value). We imputed missing values in the set of predictors using function rfImpute implemented in the package.
[0203] 5.4. Single SNP association—this kind of test was done using the PrognomixCmd tool or the Prognomix Discovery Support tool and one of the four implemented association types:
   [0204] 5.4.1. binary association—consists in an Armitage trend test for additive, dominant and recessive models, a chi-square or Fisher test for the allelic model and a 2 by 3 chi-square test for the genotypic model. These tests are implemented in the R library assoc by the function snp.chisq and in the PLINK [Purcell S, Neale B, Todd-Brown K, Thomas L, Ferreira M A R, Bender D, Maller J, Sklar P, de Bakker P I W, Daly M J & Sham P C. (2007). PLINK: a toolset for whole-genome association and population-based linkage analysis. American Journal of Human Genetics, 81.] tool by the function—assoc—geno.
   [0205] 5.4.2. continuous association—performs parametric or non parametric tests depending on the normality of the analysed trait (tested with a Shapiro-Wilk test) and the model:
      [0206] additive model—linear regression.
      [0207] dominant, recessive or allelic models—T-test or Wilcoxon test.
      [0208] genotypic model—Anova or Kruskal-Wallis tests.
      [0209] These tests are implemented in the R library assoc by the function assoc.cont.
   [0210] 5.4.3. linear regression association for quantitative traits with covariates—uses a linear regression model to test for association for all five models, possibly using covariates. These tests are implemented in the R library assoc by the function assoc.model by specifying a Gaussian regression model and in the PLINK tool by the function—linear.
   [0211] 5.4.4. logistic regression association for binary traits with covariates—uses a logistic regression model to test for association for all five models, possibly using covariates. These tests are implemented in the R library assoc by the function assoc.model by specifying a Binomial regression model and in the PLINK tool by the function—logistic.
   [0212] All four association types involve several similar steps, which can be all done using PrognomixCmd tool or the Prognomix Discovery Support tool and association command files:
      [0213] Trait data extraction—the qualitative or quantitative trait data is extracted form database for all subjects or for a subset of them into text files and transferred on the computation server.
      [0214] Genetic data extraction—the genetic data is extracted form database, generally for all markers (sometimes only for a chromosome or a list of selected SNPs).
      [0215] Test—the test is performed on the computation server using custom developed R library assoc. or PLINK.
      [0216] Database results insertion—the results generated by the tests are transferred back from the computation server, and then inserted into Prognomix database or stored using the data storage functionality of the Prognomix Discovery Support tool.
      [0217] Result reporting—the best results are extracted from database using predefined or custom defined quality filters and reported into Excel files. The interesting results are further investigated for non-automated quality filters (clusters) as described above.
   [0218] All the analysis scripts and the application output are logged for further reference or audit.
[0219] 5.5. Haplotype association—this test was only performed in genomic regions of interest using several different methods:
   [0220] 5.5.1. Find haplotype blocks in HapMap CEU population then use the blocks in our population to test for association using HaploView with the default parameters. HaploView: estimates haplotypes using an estimation-maximization (EM) approach then test association using a chi-square test for each haplotype.
   [0221] 5.5.2. Find haplotype blocks in HapMap CEU population then use the blocks in our population to test for association using the R library Haplo.Stats. Haplo.Stats uses an EM haplotype inference algorithm which incorporates the haplotype phase uncertainty rather than assigning a most likely haplotype to each sample then test for association using a generalized linear regression model.
   [0222] 5.5.3. Use the sliding window approach implemented in PLINK with different windows sizes inside which the haplotypes are estimated using an EM approach, then the association is tested with a chi-square test for each haplotype.
   [0223] 5.5.4. Use the tag SNP identification method implemented in ldSelect, which create haplotypes with tag SNPs and test for association using Haplo.Stats as above. ldSelect identifies tag SNP based on linkage disequilibrium statistic r² and a greedy algorithm by grouping SNPs into bins of associates sites where the pair wise r² is above a threshold. One SNP per bin is the tag SNP.

### 6. Phenotype Definitions

[0224] Two sets of phenotype definitions were used.
[0225] The first set was based on the initial definitions used at baseline of the ADVANCE study and was as follow:
[0226] 6.1. Stroke: cerebrovascular accident before or at the entry to ADVANCE (ADVANCE definition: Damage to blood vessels in the brain where vessels burst and bleed or become clogged with fatty deposits. When blood flow is interrupted, brain cells die or are damaged, resulting in a stroke.)
[0227] 6.2. Myocardial infarction: heart attack before or at the entry to ADVANCE (ADVANCE definition: The medical term for heart attack, which occurs when the blood supply to part of the heart muscle itself—the myocardium—is severely reduced or stopped, resulting in the death of a segment of the heart muscle.)
[0228] 6.3. Albuminuria: albumin/creatinine ratio is equal or higher than 30 μg/mg at the entry to ADVANCE (ADVANCE definition: The presence of albumin in the urine that is usually a symptom of disease of the kidneys.)
[0229] 6.4. Complications: Stroke and/or myocardial infarction and/or albuminuria as defined above.
[0230] 6.5. No Complications: None of the above complications.
[0231] The second set of definitions was established after inclusion of follow up data obtained during the conduct of the ADVANCE study and was as follow:
[0232] 6.6. Controls are T2D that at the entry to ADVANCE study had no history of or were not diagnosed with: myocardial infarction, hospitalization for unstable angina, stroke, transitory ischaemic attack, atrial fibrillation, heart failure, left ventricular hypertrophy, background retinopathy, blindness, macular oedema, proliferative retinopathy, retinal photocoagulation therapy, peripheral revascularization, amputation, estimated glomerular filtration rate below 60 mL/min/1.73 m², and albumin/creatinine ratio higher than 30 μg/mg.
[0233] 6.7. Supercontrols are a subset of controls that did not have any macrovascular (cardiovascular death, myocardial infarction, stroke) or microvascular [new or worsening nephropathy (macroalbuminuria—albumin/creatinine do higher than 300 μg/mg; high serum creatinine—higher than 200 μmol/L; need for renal replacement therapy; death due to renal disease), retinopathy (proliferative retinopathy, macular oedema, blindness, history of retinal coagulation therapy] events during the duration of ADVANCE study.
[0234] 6.8. Myocardial infarction: Heart attack and/or Q-waves diagnostics of previous myocardial infarction and/or hospitalization for unstable angina
[0235] 6.9. Albumin/creatinine ratio: quantitative trait (units μg/mg)
[0236] 6.10. Albuminuria: albumin/creatinine ratio is equal or higher than 30 μg/mg
[0237] 6.11. Microalbuminuria: albumin/creatinine ratio is equal or higher than 30 μg/mg and lower than 300 μg/mg
[0238] 6.12. Macroalbuminuria: albumin/creatinine ratio is equal or higher than 300 μg/mg
[0239] 6.13. Estimated glomerular filtration rate: quantitative trait (units mL/min/1.73 m²)
[0240] 6.14. Low estimated glomerular filtration rate: values below 60 mL/min/1.73 m²
[0241] 6.15. New worsening nephropathy event: macroalbuminuria (albumin/creatinine ratio higher than 300 μg/mg) and/or high serum creatinine (higher than 200 μmol/L) and/or need for renal replacement therapy and/or death due to renal disease) during the ADVANCE study

### 7. Association Designs

[0242] Using the first set of phenotypes we performed analysis based on the designs listed below. The results of these analyses are provided in Tables 1, 2, and 3. Table 1 provides the SNPs IDs, details of the phenotypes and covariates used during analysis and p values and odds ratios obtained for each SNP. Table 2 provides the flanking sequence of the SNPs of Table 1 and Table 3 the genes related to the SNPs of Table 1.
[0243] Myocardial infarction vs. no myocardial infarction (see Table 1, phenotype=mi):
   [0244] Cases: Type 2 diabetic patients with heart attack before or at the entry to the ADVANCE study
   [0245] Controls: Type 2 diabetic patients without heart attack at the entry to the ADVANCE study
   [0246] Covariates: no covariates, geoethnicity-PCA1
[0247] Myocardial infarction vs. no myocardial infarction—patients from region 1 only (see Table 1, phenotype=mi, region-1)
   [0248] Cases: Type 2 diabetic patients from region 1 with heart attack before or at the entry to the ADVANCE study
   [0249] Controls: Type 2 diabetic patients from region 1 without heart attack at the entry to the ADVANCE study
   [0250] Covariates: no covariates
[0251] Myocardial infarction vs. no myocardial infarction—patients from region 3 only (see Table 1: phenotype=mi, region-3)
   [0252] Cases: Type 2 diabetic patients from region 3 with heart attack before or at the entry to the ADVANCE study
   [0253] Controls: Type 2 diabetic patients from region 3 without heart attack at the entry to the ADVANCE study
   [0254] Covariates: no covariates
[0255] Albuminuria vs. no albuminuria (see Table 1, phenotype=albu):
   [0256] Cases: Type 2 diabetic patients having albuminuria at the entry to the ADVANCE study
   [0257] Controls: Type 2 diabetic patients without albuminuria at the entry to the ADVANCE study
   [0258] Covariates: no covariates, geoethnicity-PCA1
[0259] Albuminuria vs. no albuminuria patients from region 1 only (see Table 1, phenotype=albu, region-1)
   [0260] Cases: Type 2 diabetic patients from region 1 having albuminuria at the entry to the ADVANCE study
   [0261] Controls: Type 2 diabetic patients from region 1 without albuminuria at the entry to the ADVANCE study
   [0262] Covariates: no covariates
[0263] Albuminuria vs. albuminuria—patients from region 3 only (see Table 1, phenotype=albu, region-3)
   [0264] Cases: Type 2 diabetic patients from region 3 having albuminuria at the entry to the ADVANCE study
   [0265] Controls: Type 2 diabetic patients from region 3 without albuminuria at the entry to the ADVANCE study
   [0266] Covariates: no covariates
[0267] Complications vs. no complications (see Table 1, phenotype=complications)
   [0268] Cases: Type 2 diabetic patients having the above defined complications before or at the entry to the ADVANCE study
   [0269] Controls: Type 2 diabetic patients without the above defined complications at the entry to the ADVANCE study
   [0270] Covariates: no covariates, geoethnicity-PCA1
[0271] Complications vs. no complications—patients from region 1 only (see Table 1, phenotype=complications, region-1)
   [0272] Cases: Type 2 diabetic patients from region 1 having the above defined complications before or at the entry to the ADVANCE study
   [0273] Controls: Type 2 diabetic patients from region 1 without the above defined complications at the entry to the ADVANCE study
   [0274] Covariates: no covariates
[0275] Complications vs. no complications—patient from region 3 only (see Table 1, phenotype=complications, region-3)
   [0276] Cases: Type 2 diabetic patients from region 3 having the above defined complications before or at the entry to the ADVANCE study
   [0277] Controls: Type 2 diabetic patients from region 3 without the above defined complications at the entry to the ADVANCE study
   [0278] Covariates: no covariates
[0279] Stroke vs. no stroke (see Table 1, phenotype=stroke)
   [0280] Cases: Type 2 diabetic patients with stroke before or at the entry to the ADVANCE study
   [0281] Controls: Type 2 diabetic patients without stroke at the entry to the ADVANCE study
   [0282] Covariates: no covariates, geoethnicity-PCA1
[0283] Stroke vs. no stroke patients from region 1 only (see Table 1, phenotype=stroke, region-1)
   [0284] Cases: Type 2 diabetic patients from region 1 with stroke before or at the entry to the ADVANCE study
   [0285] Controls: Type 2 diabetic patients from region 1 without stroke at the entry to the ADVANCE study
   [0286] Covariates: no covariates
[0287] Stroke vs. no stroke—patients region 3 only (see Table 1, phenotype=stroke, region-3)
   [0288] Cases: Type 2 diabetic patients from region 3 with stroke before or at the entry to the ADVANCE study
   [0289] Controls: Type 2 diabetic patients from region 3 without stroke at the entry to the ADVANCE study
   [0290] Covariates: no covariates
[0291] Using the second set of phenotypes we performed analysis based on the designs listed below. For myocardial infarction, the results of these analyses are provided in Tables 4, 5, and 6. Table 4 provides the SNPs IDs, details of the phenotypes and covariates used during analysis and p values and odds ratios obtained for each SNP. Table 5 provides the flanking sequence of the SNPs of Table 4 and Table 6 the genes related to the SNPs of Table 4. For kidney disease (qualitative phenotypes), the results of these analyses are provided in Tables 7, 8, and 9. Table 7 provides the SNPs IDs, details of the phenotypes and covariates used during analysis and p values and odds ratios obtained for each SNP. Table 8 provides the flanking sequence of the SNPs of Table 7 and Table 9 the genes related to the SNPs of Table 7. For kidney disease (quantitative phenotypes), the results of these analyses are provided in Tables 10, 11, and 12. Table 10 provides the SNPs IDs, details of the phenotypes and covariates used during analysis and p values and odds ratios obtained for each SNP. Table 11 provides the flanking sequence of the SNPs of Table 10 and Table 12 the genes related to the SNPs of Table 10.
[0292] Myocardial infarction before or at the entry to ADVANCE versus no myocardial infarction before or at the entry to ADVANCE (see Table 4, phenotype=MI vs no MI (at entry))
   [0293] Cases: Type 2 diabetic patients having myocardial infarction before or at the entry to ADVANCE study
   [0294] Controls: Type 2 diabetic patients free of myocardial infarction at the entry to ADVANCE study
   [0295] Covariates: no covariates; age+sex; age+sex+geoethnicity; age+sex+geoethnicity+status of being currently treated for hypertension; age+sex+geoethnicity+albumin/creatinine ratio; age+sex+geoethnicity+estimated glomerular filtration rate
[0296] Myocardial infarction before or at the entry to ADVANCE versus clean controls (see Table 4, phenotype=MI vs control (at entry))
   [0297] Cases: Type 2 diabetic patients having myocardial infarction before or at the entry to ADVANCE study plus any other condition/disease
   [0298] Controls: controls as defined above
   [0299] Covariates: no covariates; age+sex; age+sex+geoethnicity; age+sex+geoethnicity+status of being currently treated for hypertension; age+sex+geoethnicity+albumin/creatinine ratio; age+sex+geoethnicity+estimated glomerular filtration rate
[0300] Myocardial infarction before and/or during the ADVANCE study versus no myocardial infarction before and during the ADVANCE study (see Table 4, phenotype=MI vs no MI (follow-up))
   [0301] Cases: Type 2 diabetic patients having myocardial infarction before and/or during the ADVANCE study
   [0302] Controls: Type 2 diabetic patients free of myocardial infarction before and during the ADVANCE study
   [0303] Covariates: no covariates; age+sex; age+sex+geoethnicity; age+sex+geoethnicity+status of being currently treated for hypertension; age+sex+geoethnicity+albumin/creatinine ratio; age+sex+geoethnicity+estimated glomerular filtration rate
[0304] Myocardial infarction before and/or during the ADVANCE study versus supercontrols (see Table 4, phenotype=MI vs control (follow-up))
   [0305] Cases: Type 2 diabetic patients having myocardial infarction before and/or during the ADVANCE study plus any other condition/disease
   [0306] Controls: Supercontrols as defined above
   [0307] Covariates: no covariates; age+sex; age+sex+geoethnicity; age+sex+geoethnicity+status of being currently treated for hypertension; age+sex+geoethnicity+albumin/creatinine ratio; age+sex+geoethnicity+estimated glomerular filtration rate
[0308] Albumin/creatinine ratio as a quantitative trait (see Table 10, phenotype=Albumin/Creatinine ratio at entry)
   [0309] Covariates: no covariates; age+sex; age+sex+geoethnicity
[0310] Estimated glomerular filtration rate as a quantitative trait (see Table 10, phenotype=Creatinine Clearance at entry)
   [0311] Covariates: no covariates; age+sex; age+sex+geoethnicity
[0312] Albuminuria at the entry to ADVANCE versus no albuminuria at the entry to ADVANCE (see Table 7, phenotype=albuminuria vs. no albuminuria (at entry))
   [0313] Cases: Type 2 diabetic patients having albuminuria at the entry to ADVANCE
   [0314] Controls: Type 2 diabetic patients without albuminuria at the entry to ADVANCE
   [0315] Covariates: no covariates; age+sex; age+sex+geoethnicity
[0316] Albuminuria at the entry to ADVANCE versus clean controls (see Table 7, phenotype=microalbuminuria or macroalbuminuria vs. control (at entry))
   [0317] Cases: Type 2 diabetic patients having albuminuria at the entry to ADVANCE
   [0318] Controls: controls as defined above
   [0319] Covariates: no covariates; age+sex; age+sex+geoethnicity
[0320] Microalbuminuria at the entry to ADVANCE versus no albuminuria at the entry to ADVANCE (see Table 7, phenotype=microalbuminuria vs. no albuminuria (at entry))
   [0321] Cases: Type 2 diabetic patients having microalbuminuria at the entry to ADVANCE
   [0322] Controls: Type 2 diabetic patients without albuminuria at the entry to ADVANCE
   [0323] Covariates: no covariates; age+sex; age+sex+geoethnicity
[0324] Macroalbuminuria at the entry to ADVANCE versus no albuminuria at the entry to ADVANCE (see Table 7, phenotype=macroalbuminuria vs. no albuminuria (at entry))
   [0325] Cases: Type 2 diabetic patients having macroalbuminuria at the entry to ADVANCE
   [0326] Controls: Type 2 diabetic patients without albuminuria at the entry to ADVANCE
   [0327] Covariates: no covariates; age+sex; age+sex+geoethnicity
[0328] Albuminuria at the entry and/or during the ADVANCE study versus no albuminuria at the entry and during the ADVANCE study (see Table 7, phenotype=albuminuria vs. no albuminuria (follow-up))
   [0329] Cases: Type 2 diabetic patients having albuminuria at the entry and/or during the ADVANCE study
   [0330] Controls: Type 2 diabetic patients without albuminuria at the entry and during the ADVANCE study
   [0331] Covariates: no covariates; age+sex; age+sex+geoethnicity
[0332] Albuminuria at the entry and/or during the ADVANCE study versus supercontrols (see Table 7, phenotype=microalbuminuria or macroalbuminuria vs. control (follow-up))
   [0333] Cases: Type 2 diabetic patients having albuminuria at the entry and/or during the ADVANCE study
   [0334] Controls: supercontrols as defined above
   [0335] Covariates: no covariates; age+sex; age+sex+geoethnicity
[0336] Low estimated glomerular filtration rate at the entry to ADVANCE study versus no low estimated glomerular filtration rate at the entry to ADVANCE study (see Table 7, phenotype=low creatinine clearance vs. normal creatinine clearance)
   [0337] Cases: Type 2 diabetic patients having low estimated glomerular filtration rate at the entry to ADVANCE study
   [0338] Controls: Type 2 diabetic patients not having low estimated glomerular filtration rate at the entry to ADVANCE study
   [0339] Covariates: no covariates; age+sex; age+sex+geoethnicity
[0340] Low estimated glomerular filtration rate at the entry to ADVANCE study versus clean controls (see Table 7, phenotype=low glomerular filtration rate vs. control (at entry))
   [0341] Cases: Type 2 diabetic patients having low estimated glomerular filtration rate at the entry to ADVANCE study
   [0342] Controls: controls as defined above
   [0343] Covariates: no covariates; age+sex; age+sex+geoethnicity
[0344] Low estimated glomerular filtration rate at the entry to ADVANCE and/or new worsening nephropathy event during the ADVANCE study versus no low estimated glomerular filtration rate at the entry and no new worsening nephropathy event during ADVANCE study (see Table 7, phenotype=low glomerular filtration rate vs. normal glom. filtration rate (follow-up))
   [0345] Cases: Type 2 diabetic patients having low estimated glomerular filtration rate at the entry to ADVANCE study and/or new worsening nephropathy event
   [0346] Controls: Type 2 diabetic patients not having low estimated glomerular filtration rate at the entry to ADVANCE study and no new worsening nephropathy event
   [0347] Covariates: no covariates; age+sex; age+sex+geoethnicity
[0348] Low estimated glomerular filtration rate at the entry to ADVANCE and/or new worsening nephropathy event during the ADVANCE study versus supercontrols (see Table 7, phenotype=low glomerular filtration rate vs. control (follow-up))
   [0349] Cases: Type 2 diabetic patients having low estimated glomerular filtration rate at the entry to ADVANCE study and/or new worsening nephropathy event
   [0350] Controls: supercontrols as defined above
   [0351] Covariates: no covariates; age+sex; age+sex+geoethnicity

### EXAMPLES

[0352] The invention will be explained below with reference to the following non-limiting examples.

### Example 1

### Geoethnic Clustering

[0353] It is has been shown that we can distinguish without any overlap Caucasians, Africans and Asians. Given the density of the currently available genomic markers and the power of our study, we demonstrated that we can distinguish individuals of Caucasian origin within European populations. Our data show that using a subset of 14,961 SNPs (list in provided in Table 13) unrelated to T2D complications, we were able to cluster the individuals into three groups along the PC1 and PC2 axes (FIG. 1): Group 1 (n=1317 individuals), Group 2 (n=80) and Group 3 (n=507). The two predominant populations (Group 1 and Group 3) exhibit a west/east cline in Europe and a majority of the western type (Group 1) were found in Australia, New-Zealand and Canada (FIG. 2). It is relevant to state here that population in Eastern Europe (Group 3) present a higher prevalence of complications such as and not limited to albuminuria, hypertension, stroke and myocardial infarction (FIG. 3). The observed excess of complications in predominantly Eastern regions (Group 3) is mainly related to the higher frequency of risk alleles compared to Western regions (Group 1) (FIG. 4A-C, example of SNPs on chr 2 for albuminuria, all complications and MI). The figure shows same impact in an individual independently of environment, but higher allele frequency in population 3. Occurring less frequently, the increased disease prevalence (albuminuria or stroke) is at least partially dependent on the allele penetrance (albuminuria on chr6 and stroke on chr11) (i.e., the frequency is similar in groups 1 and 3, but the impact on the individual is more severe in his/her genomic in population 1 for stroke and population 3 for albuminuria). See, FIGS. 4 D and E. The test should thus be appropriately tailored to identify the geo-ethnic specificity by including SNPs among the 14,961 identified in our studies. There is a two prone importance for this finding. 1) a public health relevance modifying the public health strategies as a result of the knowledge of the risk in specific population and 2) at the level of the individual and of his or her relatives, where the impact may require specific individualized approach of prevention and treatment.

[0354] Further demonstration of the power of the method can be shown by assessing the effect of varying the number of SNPs used on the accuracy of the classification.

[0355] The fine grain stratification analysis consisted of the following steps: 430 205 Affymetrix SNPs that are common to Affymetrix Genome-Wide Human SNP Array 5.0 and Affymetrix Genome-Wide Human SNP Array 6.0 were filtered using PLINK SNP filters which consists of a minor allele frequency (MAF) superior to 0.01, a missing individual call rate (MIND) of at most 0.1, a SNP call rate of at least 0.98 and a Hardy-Weinberg equilibrium threshold of 0.001. After the filters were applied, the 350 895 resulting SNPs were scanned for LD using an R-squared threshold of 0.8 and PLINK. The final number of SNPs was 147691 and all of them were fed to SMARTPCA version 7521 of EIGENSOFT 2.0 (Alkes L Price, Nick J Patterson, Robert M Plenge, Michael E Weinblatt, Nancy A Shadick, David Reich. Principal components analysis corrects for stratification in genome-wide association studies. Nature Genetics, Vol. 38, No. 8. (23 Jul. 2006), pp. 904-909) to obtain the principal components number 1 and 2.

[0356] The fine grain principal component analysis using only 2 000 SNPs consisted of the following steps: 1) run the analysis for 147 691 SNPs (see above) and then obtain the SNP weights (loadings) for PC1 and PC2 from SMARTPCA; 2) use the PC1 and PC2 weights to derive a combined score as the following: SCORE=absolute value (PCI)+absolute value (PC2) 3) remove the rightmost percentile of the combined score distribution to remove any artifacts that could influence the procedure when using a small number of SNPs; 4) starting from the rightmost distribution of the combined scores, define sets of SNPs as the first 50, 100, 500, 1000, 2000, 5000 and 10000; 5) Run SMARTPCA to obtain the PC1 and PC2 values for every set of SNPs; 6) Run K-means clustering (in house method) on the fine grain stratification of the 147691 SNPs to obtain 3 specific clusters; 7) repeat this procedure for the sets of SNPs defined above (50, 100, 500, 1000, 2000, 5000 and 10000); 8) obtain cluster classification accuracy by comparing the cluster assigned to each individual from every set of SNP versus the reference clusters of the PCA run with 147691 SNPs (see table 15). The lowest number of SNPs which yields 99% classification accuracy is 2000 (listed in table 14).

[0357] The models obtained from either 500 to 147691 SNPs could be used to assign newly obtained patients to a geographic location. This could imply geographic-specific conclusions incorporated into our prediction tool.

### Example 2

### Combination of SNPs

[0358] Demonstration of the predictive power of the SNP provided in tables 1, 4, 7 and 10 could be made by combining several of those SNP markers selected based on their level of association with diabetes complications and on the frequency of their risk or protective alleles in the population. Several methods are known by those skilled in the art to select appropriate markers.

[0359] Particularly preferred are combinations of biomarkers provided in tables 16 and 19.

[0360] Prediction models rely on training and testing sets or bootstrap procedures. Two different models of classification were used: logistic regression and support vector machines. Logistic regression is a well known method which models the probability of a binary variable representing the outcome of interest (event vs. non-event) as a function of quantitative and/or categorical predictors. Support vector machine searches for optimal hyperplanes that separate two classes (here cases and controls) by maximizing the margin between the classes' closest points.

[0361] Support vector machines. A subset of discriminative SNPs resulting from GWA association tests should be able to correctly classify the complications related to T2D at an acceptable area under the “Receiver Operating Characteristics” (ROC) curve (AUC) accuracy (0.75) considered between random classification (0.5) and perfect classification (1.0). Based on the hypothesis that a signature found on all observations will classify with acceptable accuracy subsets of individuals composing the whole set, a model was constructed by adding the 1000 most significant SNPs from genome wide associations (p-value) performed on all individuals. Our initial results on T2D complications show that the AUC increases to 0.9 as the number of the best associated SNPs increases to 1000. Association analyses were set to automatically exclude SNPs on the basis of missing genotype rate, with the PLINK—geno option. We included SNPs with at least 98% genotyping rate (2% missing). Given that prediction methods have a hard time or do not deal with missing data, we performed genotype imputation with fastPHASE V1.2.3.[Stephens, M., Smith, N., and Donnelly, P. (2001). A new statistical method for haplotype reconstruction from population data. American Journal of Human Genetics, 68, 978-989] Adding SNPs not-associated to complications never increased the predictive accuracy of the method (FIG. 5). From the top 5 000 associated SNPs in the entire dataset we identified 95 independent SNPs (listed in Table 13) maintaining 0.85 predictive value using INTERACT (Zheng, Zhao. Searching for Interacting Features, In Proc. of International Joint Conference on Artificial Intelligence (IJCAI), January, 2007). (FIG. 6). Using ADVANCE data, we thus demonstrated for the first time significant genomic determinants of vascular complications of diabetes.

[0362] Logistic regression. We used a bootstrap procedure that samples with replacement from the whole dataset during 1000 iterations [1) Angelo Canty and Brian Ripley (2009). boot: Bootstrap R(S-Plus) Functions. R package version 1.2-35. 2) Davison, A. C. & Hinkley, D. V. (1997) Bootstrap Methods and Their Applications. Cambridge University Press, Cambridge]. The AUC reported is the mean from all the bootstrap iterations and a confidence interval was constructed at 95%. The experience was repeated on four different models: only SNPs (top 250 associated SNPs from GWA of myocardial infarction), combined biomarkers and SNPs, only biomarkers added one at a time and each biomarker separately. Examples of biomarkers used for classification include, but are not limited to, age of diagnosis, diabetes duration at baseline, cigarette smoking, systolic blood pressure, atrial fibrillation, glycated hemoglobin (HbA1_{c}), total cholesterol, HDL cholesterol and sex. The FIG. 7 and tables 14 and 15 shows the AUC in function of the number of SNPs and the number of biomarkers by model. The highest classification accuracy of simple biomarkers is achieved by smoking and systolic blood pressure. The predictive accuracy of a model containing all the biomarkers in an additive manner gets an AUC of 0.72. The classification accuracy obtained with 250 best associated SNPs (table 16) is almost similar to the one acquired by a combination of biomarkers and the same number of SNPs (AUC 98%).

### Example 3

### Selection of Patients for Clinical Trials of T2D Drugs

[0363] Application of a classification tool in selecting patients with higher risk for T2D complications could dramatically reduce the sample size (and/or the time and cost) required to perform clinical outcome studies in T2D. In our estimations we assumed the following scenario. A randomized clinical trial with two arms is designed to test the impact of novel antidiabetic medication on the rate of cardiovascular events in T2D patients. In one arm, patients receive the usual medication (control arm) whereas, in the other arm (treatment arm), patients receive the novel antidiabetic medication in top of the usual medication. The number of samples required in both arms is such that a difference of 20% between the two arms respective annual event rates will be detected with 80% power at a fixed significance level of 5%. The trial is planned for 5 years.

[0364] FIG. 8 shows the impact of the annual event rate in the control arm on the number of patients which need to be enrolled at entry. In the graph is shown the observed 3.2% annual event rate of MACE in the ADVANCE trial. Based on a general population of diabetics, the number of subjects needed to achieve the required number of MACE events, without applying any selection criteria at entry, would be ˜60 000 subjects. Using SNPs selected from those listed in tables 1, 4, 7, 10, 13, 14, 16 and 19 of the present invention, with or without other biomarkers, to select patients for such a trial will considerably decrease the number of subjects to recruit in the trial. As an example, increasing AUC from 65% to 85% would reduce the number of required subjects to be enrolled at entry from 11,145 to 2,475 in order to obtain the same number of events during the clinical trial. Similar scenarios may be envisioned for outcome studies for other classes of novel therapies using this approach and, if determining the rate of cardiovascular events is the objective, using SNPs selected from those listed in tables 1, 4, 7, 10, 13, 14, 16 and 19 of the present invention.

[0365] The preceding examples can be repeated with similar success by substituting the generically or specifically described reactants and/or operating conditions of this invention for those used in the preceding examples.

[0366] From the foregoing description, one skilled in the art can easily ascertain the essential characteristics of this invention and, without departing from the spirit and scope thereof, can make various changes and modifications of the invention to adapt it to various usages and conditions. All publications and patents cited above are incorporated herein by reference.

Lengthy table referenced here
US20100099091A1-20100422-T00001
Please refer to the end of the specification for access instructions.

Lengthy table referenced here
US20100099091A1-20100422-T00002
Please refer to the end of the specification for access instructions.

Lengthy table referenced here
US20100099091A1-20100422-T00003
Please refer to the end of the specification for access instructions.

Lengthy table referenced here
US20100099091A1-20100422-T00004
Please refer to the end of the specification for access instructions.

Lengthy table referenced here
US20100099091A1-20100422-T00005
Please refer to the end of the specification for access instructions.

Lengthy table referenced here
US20100099091A1-20100422-T00006
Please refer to the end of the specification for access instructions.

Lengthy table referenced here
US20100099091A1-20100422-T00007
Please refer to the end of the specification for access instructions.

Lengthy table referenced here
US20100099091A1-20100422-T00008
Please refer to the end of the specification for access instructions.

Lengthy table referenced here
US20100099091A1-20100422-T00009
Please refer to the end of the specification for access instructions.

Lengthy table referenced here
US20100099091A1-20100422-T00010
Please refer to the end of the specification for access instructions.

Lengthy table referenced here
US20100099091A1-20100422-T00011
Please refer to the end of the specification for access instructions.

Lengthy table referenced here
US20100099091A1-20100422-T00012
Please refer to the end of the specification for access instructions.

Lengthy table referenced here
US20100099091A1-20100422-T00013
Please refer to the end of the specification for access instructions.

Lengthy table referenced here
US20100099091A1-20100422-T00014
Please refer to the end of the specification for access instructions.

Lengthy table referenced here
US20100099091A1-20100422-T00015
Please refer to the end of the specification for access instructions.

Lengthy table referenced here
US20100099091A1-20100422-T00016
Please refer to the end of the specification for access instructions.

Lengthy table referenced here
US20100099091A1-20100422-T00017
Please refer to the end of the specification for access instructions.

Lengthy table referenced here
US20100099091A1-20100422-T00018
Please refer to the end of the specification for access instructions.

Lengthy table referenced here
US20100099091A1-20100422-T00019
Please refer to the end of the specification for access instructions.

Lengthy table referenced here
US20100099091A1-20100422-T00020
Please refer to the end of the specification for access instructions.

Lengthy table referenced here
US20100099091A1-20100422-T00021
Please refer to the end of the specification for access instructions.

LENGTHY TABLES
The patent application contains a lengthy table section. A copy of the table is available in electronic form from the USPTO web site (http://seqdata.uspto.gov/?pageRequest=docDetail&DocID=US20100099091A1). An electronic copy of the table will also be available from the USPTO upon request and payment of the fee set forth in 37 CFR 1.19(b)(3).

We claim:

1. A method for predicting a risk of developing a complication which is myocardial infarction, stroke, albuminuria and/or declining glomerular filtration in a subject affected by T2D, comprising detecting, in a sample obtained from said subject, at least one genetic feature which is
(a) at least one single nucleotide polymorphism (SNP) listed in Table 1, 4, 7, 10, 16 or 19;
(b) at least one SNP which is in linkage disequilibrium with at least one SNP of (a); or
(c) at least one short tandem repeat (STR) that is in linkage disequilibrium with at least one SNP of (a),
wherein the detection of said genetic feature in said subject correlates with said risk of developing at least one of said complications.

2. The method according to claim 1, comprising detecting a SNP or a STR of at least one gene which is listed in Table 3, 6, 9 or 12.

3. The method according to claim 1, wherein detection of said genetic feature correlates with increased or reduced risk of developing said complication.

4. The method according to claim 1, comprising detecting at least one SNP from the list of SNPs of Table 1, 4, 7 or 10, said SNP being selected on the basis of its p value of association with said complication(s), allele frequency and odds ratio.

5. The method according to claim 1, comprising detecting at least two of said SNPs.

6. The method according to claim 1, comprising detecting at least three of said SNPs.

7. The method according to claim 1, comprising detecting more than three of said SNPs

8. The method according to claim 1, wherein said STR and/or SNP is detected in said patient in a specific geo-ethnic context.

9. The method of claim 8, comprising determining the geoethnic origin of an individual by detecting one or more SNPs listed in Table 13 or 14.

10. The method according to claim 1, wherein the genetic feature is
(a) at least one single nucleotide polymorphism (SNP) listed in Table 16 or 19;
(b) at least one SNP which is in linkage disequilibrium with at least one SNP of (a); or
(c) at least one short tandem repeat (STR) that is in linkage disequilibrium with at least one SNP of (a).

11. The method according to claim 10, comprising detecting at least two SNPs from the SNPs listed in Table 16 or 19.

12. The method according to claim 10, comprising detecting at least three SNPs from the SNPs listed in Table 16 or 19.

13. The method according to claim 1, with the proviso that said at least one SNP is not one of the SNPs listed in table 20.

14. A method for predicting a risk of developing a complication which is myocardial infarction, stroke, or albuminuria and/or declining glomerular filtration in a subject affected by T2D, comprising detecting, in a sample obtained from said subject, at least one genetic feature which is
(a) at least one (SNP) from at least one gene listed in Table 3, 6, 9 or 12 or a locus linked to said gene;
(b) at least one STR found to be in linkage disequilibrium with at least one (SNP) from at least one gene listed in Table 3, 6, 9 or 12,
wherein the detection of said SNP or STR in said subject correlates with said risk of developing said complication.

15. The method according to claim 14, with the proviso that said at least one gene is not one of the genes listed in Table 21.

16. A kit for predicting a complication which is myocardial infarction, stroke, albuminuria or declining glomerular filtration in a subject affected by type-2 diabetes (T2D) comprising in one or more packages
(a) an oligonucleotide that specifically hybridizes to a SNP having the RefSNP ID listed in Table 1, 4, 7, 10, 16 or 19; or
(b) an oligonucleotide which is the complement of (a);
and one or more reagents for the detection of said oligonucleotide.

17. The kit according to claim 16, comprising one or more reagents for polymerase chain reaction (PCR).

18. The kit of claim 16, further comprising an RNase.

19. The kit of claim 16, which further comprises one or more reagents for isolation of cells from a sample.

20. The kit of claim 19, wherein said sample is a blood sample.

21. The kit of claim 16, further comprising a DNAse inhibitor.

22. The kit of claim 16, further comprising reagents for sequencing in one or more packages.

23. The kit of claim 16, further comprising one or more nucleic acid microarrays in one or more packages.

24. The kit of claim 16, wherein the oligonucleotide comprises the probe sequences of Tables 2, 5, 8, 9, 11, 16 and 19.

25. The kit of claim 16, wherein the oligonucleotide is
(a) an oligonucleotide comprising at least 80% sequence identity to the oligonucleotide having the RefSNP ID listed in Table 1, 4, 7, 10, 16 or 19; or
(b) an oligonucleotide which is complimentary to the oligonucleotide of (a).

25. The kit of claim 16, wherein the oligonucleotide is
(c) an oligonucleotide comprising at least 90% sequence identity to the oligonucleotide having the RefSNP ID listed in Table 1, 4, 7, 10, 16 or 19; or
(d) an oligonucleotide which is complimentary to the oligonucleotide of (a).

27. The kit of claim 16, wherein the oligonucleotide is
(e) an oligonucleotide comprising at least 95% sequence identity to the oligonucleotide having the RefSNP ID listed in Table 1, 4, 7, 10, 16 or 19; or
(f) an oligonucleotide which is complimentary to the oligonucleotide of (a).

28. The kit of claim 16, wherein the oligonucleotide is
(g) an oligonucleotide comprising at least 100% sequence identity to the oligonucleotide having the RefSNP ID listed in Table 1, 4, 7, 10, 16 or 19; or
(h) an oligonucleotide which is complimentary to the oligonucleotide of (a).

29. The kit of claim 16, which further comprises a control oligonucleotide that hybridizes to the wild-type allele.

30. Use of a kit according to claim 16 for predicting a complication which is myocardial infarction, stroke, albuminuria or declining glomerular filtration in a subject affected by type-2 diabetes (T2D).

31. A method for preventing, treating or reducing the risk of T2D or a T2D related complication which is myocardial infarction, stroke, albuminuria or declining glomerular filtratrion in a subject in need thereof, comprising administrating to said subject a therapeutic agent which
(a) alters the enzymatic activity or levels of a polypeptide encoded by at least one risk gene listed in Table 3, 6, 9; or
(b) alters the expression of at least one polymorphism disclosed in table 1, 4, 7, 10, 16, or 19; or
(c) alters the specific metabolic or other biologically related pathway implicating the risk gene of (a).

32. The method according to claim 31, wherein the therapeutic agent alters the expression of at least one polymorphism disclosed in table 1, 4, 7, 10, 16, or 19.

33. The method according to claim 31, wherein the therapeutic agent is an antisense oligonucleotide or an siRNA.

34. The method according to claim 31, wherein the therapeutic agent alters the levels or enzymatic activity of a polypeptide encoded by at least one risk gene listed in Table 3, 6, 9.

35. The method according to claim 31, wherein the therapeutic agent is an antibody.

36. A method for identifying a subject for preventive therapeutic action, comprising detecting, in a sample obtained from said subject, at least one genetic feature which is
(a) at least one single nucleotide polymorphism (SNP) listed in Table 1, 4, 7, 10, 16 or 19;
(b) at least one SNP which is in linkage disequilibrium with at least one SNP of (a); or
(c) short tandem repeat (STR) that is in linkage disequilibrium with at least one SNP of (a), wherein the detection of said genetic feature in said subject correlates with the eligibility of said subject for said preventive therapeutic action.

The application's sequence listing, which the Patent Office published only in electronic form, follows.

SEQUENCE LISTING (7730 sequences)

SEQ ID NO: 1 - DNA, 33 bp, Homo sapiens
tctcactctctgactcmccattttaatgagcaa

SEQ ID NO: 2 - DNA, 33 bp, Homo sapiens
ttttctgtagcaagcamctgatcgttcagtaaa

SEQ ID NO: 3 - DNA, 33 bp, Homo sapiens
aattactatggcatatraagtactacagcacgg

SEQ ID NO: 4 - DNA, 33 bp, Homo sapiens
ctaagaaatttattccycaattaggcagcattt

SEQ ID NO: 5 - DNA, 33 bp, Homo sapiens
ctcctttggcaaagacyacgaattttgacaaga

SEQ ID NO: 6 - DNA, 33 bp, Homo sapiens
ctttagaacatgagcgwaaatggatagaagtag

SEQ ID NO: 7 - DNA, 33 bp, Homo sapiens
ggatgggctctatgatyagtctctaatgaggta

SEQ ID NO: 8 - DNA, 33 bp, Homo sapiens
ggcccaggagaccctaratctttgtatcttttc

SEQ ID NO: 9 - DNA, 33 bp, Homo sapiens
ggcccattaatcaagakacctgaaaggcttcca

SEQ ID NO: 10 - DNA, 33 bp, Homo sapiens
ggctggggcaaacaaayatcctagcaattggag

SEQ ID NO: 11 - DNA, 33 bp, Homo sapiens
gggatcaggaaggtggkactctgtttttatgag

SEQ ID NO: 12 - DNA, 33 bp, Homo sapiens
gggccacatgctgatasgtgagaggcggtgggg

SEQ ID NO: 13 - DNA, 33 bp, Homo sapiens
gggctagggtttcctgyagtatgcaataacatt

SEQ ID NO: 14 - DNA, 33 bp, Homo sapiens
gggctctcagcctttaygctgtgaaacaaagac

SEQ ID NO: 15 - DNA, 33 bp, Homo sapiens
ggggccatggaacaagkcatttagctaataact

SEQ ID NO: 16 - DNA, 33 bp, Homo sapiens
gggggtccagtttctasgtagatgaaggaacta

SEQ ID NO: 17 - DNA, 33 bp, Homo sapiens
ggggttaaacaggcagycatcttttaatgcgat

SEQ ID NO: 18 - DNA, 33 bp, Homo sapiens
ggggtttcctcatcaartccaaggccatttccc

SEQ ID NO: 19 - DNA, 33 bp, Homo sapiens
gggtaaagataggtcasatgaagtaatctccgc

SEQ ID NO: 20 - DNA, 33 bp, Homo sapiens
gggtatttctctgctaygttttatttgtgaaaa

SEQ ID NO: 21 - DNA, 33 bp, Homo sapiens
gggtctccactttcacygggactcaaaccccct

SEQ ID NO: 22 - DNA, 33 bp, Homo sapiens
gggtgaggtggaaagcrgactgtagcatttact

SEQ ID NO: 23 - DNA, 33 bp, Homo sapiens
ggtacttttgtaaaggyatttgatatggtttgt

SEQ ID NO: 24 - DNA, 33 bp, Homo sapiens
ggtagatctgaaggcawtgatatgaggtctcac

SEQ ID NO: 25 - DNA, 33 bp, Homo sapiens
ggttaacttcttttcartacagatggtttaaaa

SEQ ID NO: 26 - DNA, 33 bp, Homo sapiens
ggtttgtgtgtacttakctaatttttaaagaag

SEQ ID NO: 27 - DNA, 33 bp, Homo sapiens
gtaaagcttggccacargtcaatgggggaagga

SEQ ID NO: 28 - DNA, 33 bp, Homo sapiens
gtaaatgaagtttaacrggaacatgatcacacc

SEQ ID NO: 29 - DNA, 33 bp, Homo sapiens
gtaaatgacacaacacraacaaccagtaaagaa

SEQ ID NO: 30 - DNA, 33 bp, Homo sapiens
gtaaatgtttcgagtaygttattgggctccatt

SEQ ID NO: 31 - DNA, 33 bp, Homo sapiens
gtaactatagtttacartaagccattttacctt

SEQ ID NO: 32 - DNA, 33 bp, Homo sapiens
gtaagaaactgacctayggattcaatgctatcc

SEQ ID NO: 33 - DNA, 33 bp, Homo sapiens
gttttctggaaacccartaaaggaacagatctt

SEQ ID NO: 34 - DNA, 33 bp, Homo sapiens
gtaattgtcctcaaatyagagaacactgggtgg

SEQ ID NO: 35 - DNA, 33 bp, Homo sapiens
gtactagagctggtaarcaacagaggagtacag

SEQ ID NO: 36 - DNA, 33 bp, Homo sapiens
gtactgggatgaaaacrgatggcccctactctt

SEQ ID NO: 37 - DNA, 33 bp, Homo sapiens
gtagagatgcttaaaaytgatgaatcaagagat

SEQ ID NO: 38 - DNA, 33 bp, Homo sapiens
gtagccgttaagctccrcaaatcacatttaatc

SEQ ID NO: 39 - DNA, 33 bp, Homo sapiens
gtaggcaattgtaacaraaatggcatttgtgta

SEQ ID NO: 40 - DNA, 33 bp, Homo sapiens
gtatccttggtcgtaayctaacagaagctaata

SEQ ID NO: 41 - DNA, 33 bp, Homo sapiens
gtatgaacatttgacaytgtaacctattactat

SEQ ID NO: 42 - DNA, 33 bp, Homo sapiens
gtattagaggtagaaayttgagattcattatcc

SEQ ID NO: 43 - DNA, 33 bp, Homo sapiens
gtcaaggtctctttccycatgaagatgtaattt

SEQ ID NO: 44 - DNA, 33 bp, Homo sapiens
gtcaggggttctcaaayggatttcaggaccctt

SEQ ID NO: 45 - DNA, 33 bp, Homo sapiens
gtcccttcctattaaarcacctaacacactagg

SEQ ID NO: 46 - DNA, 33 bp, Homo sapiens
gtctagcattccattaratttgtacgtgtattt

SEQ ID NO: 47 - DNA, 33 bp, Homo sapiens
gtctcaccaggtctacrctctgctattcaaaga

SEQ ID NO: 48 - DNA, 33 bp, Homo sapiens
gtctcaggattacatargaatttaggaaatttg

SEQ ID NO: 49 - DNA, 33 bp, Homo sapiens
gtctcagtctctagacsaggtattctcagattc

SEQ ID NO: 50 - DNA, 33 bp, Homo sapiens
gtctccattagatcatyaggtgacagtaatagt

SEQ ID NO: 51 - DNA, 33 bp, Homo sapiens
gtcttataatgggaacrgaccacttgacagtac

SEQ ID NO: 52 - DNA, 33 bp, Homo sapiens
gtcttccttgttccaaytgaagatataaattgc

SEQ ID NO: 53 - DNA, 33 bp, Homo sapiens
gtgaccttgaaaaatgraaggaggacatcttcc

SEQ ID NO: 54 - DNA, 33 bp, Homo sapiens
gtgatggttggagaaaygggcacctggctttaa

SEQ ID NO: 55 - DNA, 33 bp, Homo sapiens
gtgccacggatttgaamataaacttgaaaatca

SEQ ID NO: 56 - DNA, 33 bp, Homo sapiens
gtgcctctttcaggtaygtttgtcaggggaggt

SEQ ID NO: 57 - DNA, 33 bp, Homo sapiens
gtgcttaaacatatacracgcattaaatgaagc

SEQ ID NO: 58 - DNA, 33 bp, Homo sapiens
gtgcttgctgtctccaytagtaatatgtctata

SEQ ID NO: 59 - DNA, 33 bp, Homo sapiens
gtgctttgctttagatsactggtttgtttctat

SEQ ID NO: 60 - DNA, 33 bp, Homo sapiens
gtggtaagatctgacaktcaagaaagcaaccaa

SEQ ID NO: 61 - DNA, 33 bp, Homo sapiens
gtggtatacagctttayagacaaccactacctc

SEQ ID NO: 62 - DNA, 33 bp, Homo sapiens
gtgtgatcttaaactcwacagcttagaggtgcc

SEQ ID NO: 63 - DNA, 33 bp, Homo sapiens
gttcatatgccctgccyggactctaacaggcta

SEQ ID NO: 64 - DNA, 33 bp, Homo sapiens
gttctaaaggaagggawctgggcaaaaactgaa

SEQ ID NO: 65 - DNA, 33 bp, Homo sapiens
gttgaagatgtcatgcratgtcaacctggagtt

SEQ ID NO: 66 - DNA, 33 bp, Homo sapiens
gttgagcatgtttaccwacacacagcaccccgg

SEQ ID NO: 67 - DNA, 33 bp, Homo sapiens
gttggatgcttcatccycgatgctacagtgttg

SEQ ID NO: 68 - DNA, 33 bp, Homo sapiens
gtttaattctcagaccraacaccagaacctagg

SEQ ID NO: 69 - DNA, 33 bp, Homo sapiens
gtttcagaagcttccartcactgaccaattatt

SEQ ID NO: 70 - DNA, 33 bp, Homo sapiens
gtttgtatcagtactaygcagttcttttctctt

SEQ ID NO: 71 - DNA, 33 bp, Homo sapiens
gtttgtcagaagtgacrcattatgaggggatgc

SEQ ID NO: 72 - DNA, 33 bp, Homo sapiens
gttttcagaactctacyaaatctcccagcacca

SEQ ID NO: 73 - DNA, 33 bp, Homo sapiens
gttttgtggttaaaggracatgttagaggaaat

SEQ ID NO: 74 - DNA, 33 bp, Homo sapiens
gtttttgcattcctaargacgaaaattctttaa

SEQ ID NO: 75 - DNA, 33 bp, Homo sapiens
taaaaatacttaagccwcttaactataaacatc

SEQ ID NO: 76 - DNA, 33 bp, Homo sapiens
taaaacaattaatggcmacaaagactaggaggc

SEQ ID NO: 77 - DNA, 33 bp, Homo sapiens
taaagagtgaaaacccraagtagagaaacaata

SEQ ID NO: 78 - DNA, 33 bp, Homo sapiens
taaatagagtacacaayaggttccttgtcttca

SEQ ID NO: 79 - DNA, 33 bp, Homo sapiens
taaatcaagtgtttaargagggacattcacgtc

SEQ ID NO: 80 - DNA, 33 bp, Homo sapiens
taaatctttccagacaycaaagtagactctctc

SEQ ID NO: 81 - DNA, 33 bp, Homo sapiens
taaatgtcaattcaaarttcaggaagttcacca

SEQ ID NO: 82 - DNA, 33 bp, Homo sapiens
taactgtacatacatarcaggccaaaatcatag

SEQ ID NO: 83 - DNA, 33 bp, Homo sapiens
taagagaatgaatgtcyagccaaccactggatt

SEQ ID NO: 84 - DNA, 33 bp, Homo sapiens
taagatcccacagtcaytaggagcagaatcaat

SEQ ID NO: 85 - DNA, 33 bp, Homo sapiens
taagctgcaattcttakgtgctttagagtgtaa

SEQ ID NO: 86 - DNA, 33 bp, Homo sapiens
taagtaggattccatasgtaaaaataacccact

SEQ ID NO: 87 - DNA, 33 bp, Homo sapiens
taatagccatcataccrggggaaaagagaagtg

SEQ ID NO: 88 - DNA, 33 bp, Homo sapiens
taatcaccaaaaataaygatgaccagaattttc

SEQ ID NO: 89 - DNA, 33 bp, Homo sapiens
taatccgatttcatcarctcacactaatcacta

SEQ ID NO: 90 - DNA, 33 bp, Homo sapiens
taatctcatgcttacaraagagttgcaaaaata

SEQ ID NO: 91 - DNA, 33 bp, Homo sapiens
taatgaaagcaccaggwcactctcataaatatg

SEQ ID NO: 92 - DNA, 33 bp, Homo sapiens
taatggcttgagcttcsaaattgctgaagggtt

SEQ ID NO: 93 - DNA, 33 bp, Homo sapiens
tacaaatattgaacaaktgaaaaggtcacagat

SEQ ID NO: 94 - DNA, 33 bp, Homo sapiens
tacaggcaaatgagagrctattactcaccacaa

SEQ ID NO: 95 - DNA, 33 bp, Homo sapiens
tacatctttacctaaartgattaacaagtagcc

SEQ ID NO: 96 - DNA, 33 bp, Homo sapiens
tactctggagataggaratttttcttgatcaag

SEQ ID NO: 97 - DNA, 33 bp, Homo sapiens
tacttctgaagcatgaygctagagtggaaagaa

SEQ ID NO: 98 - DNA, 33 bp, Homo sapiens
tacttgggagcgaggartattggagacagggaa

SEQ ID NO: 99 - DNA, 33 bp, Homo sapiens
tagaaatgtgctcttayggtttttgctatttgt

SEQ ID NO: 100 - DNA, 33 bp, Homo sapiens
tagaacctttaagccartcgtttgacagctgtg

SEQ ID NO: 101 - DNA, 33 bp, Homo sapiens
tagagaacctggcaaaytgaccaagcaccacta

SEQ ID NO: 102 - DNA, 33 bp, Homo sapiens
tagaggttatgaccacygaactaagagaccaga

SEQ ID NO: 103 - DNA, 33 bp, Homo sapiens
tagagtgaggattaacrgagagccaggtgcctg

SEQ ID NO: 104 - DNA, 33 bp, Homo sapiens
tagattgatgttgctaycatataatttccaatt

SEQ ID NO: 105 - DNA, 33 bp, Homo sapiens
tagcacacatttcttayacatagttcctaccag

SEQ ID NO: 106 - DNA, 33 bp, Homo sapiens
aattctggggaaacaamctgacctcttcatttg

SEQ ID NO: 107 - DNA, 33 bp, Homo sapiens
tagcccaacggatatcmatgaaatactttgctt

SEQ ID NO: 108 - DNA, 33 bp, Homo sapiens
taggaagtttacaaacraatgagaaaaatgagt

SEQ ID NO: 109 - DNA, 33 bp, Homo sapiens
taggagacaaaatagaygatgatcaaggaatcc

SEQ ID NO: 110 - DNA, 33 bp, Homo sapiens
taggcagcactgatccraggtgacagaccccag

SEQ ID NO: 111 - DNA, 33 bp, Homo sapiens
taggtagattctggtaratagctgggaactatt

SEQ ID NO: 112 - DNA, 33 bp, Homo sapiens
taggtcaaggtcactargtaaataataatacat

SEQ ID NO: 113 - DNA, 33 bp, Homo sapiens
tagtgatagtcctatcsaagagttcaaatggtc

SEQ ID NO: 114 - DNA, 33 bp, Homo sapiens
ttcaacaagttagtgaygtagaataaatacaat

SEQ ID NO: 115 - DNA, 33 bp, Homo sapiens
tatattagtgacactaycttgatcaaattgtaa

SEQ ID NO: 116 - DNA, 33 bp, Homo sapiens
tatcatcagctacaccraacactcaagtgtagc

SEQ ID NO: 117 - DNA, 33 bp, Homo sapiens
tatgcttcacactttcmaaatttctactacacg

SEQ ID NO: 118 - DNA, 33 bp, Homo sapiens
tatgcttgcaagtggawaaatagggtacagaaa

SEQ ID NO: 119 - DNA, 33 bp, Homo sapiens
tatgtgatttggactgwaactgcatcaggaaaa

SEQ ID NO: 120 - DNA, 33 bp, Homo sapiens
tatgttctctacagtcraattaaatgaagaaga

SEQ ID NO: 121 - DNA, 33 bp, Homo sapiens
tattataaaagcctccyagttggtgtccttgat

SEQ ID NO: 122 - DNA, 33 bp, Homo sapiens
tatttcacaatgcctcracctgaagaatgctat

SEQ ID NO: 123 - DNA, 33 bp, Homo sapiens
tatttgccaaagcccawgtcgagaagggaaatt

SEQ ID NO: 124 - DNA, 33 bp, Homo sapiens
tatttttcgttttcagracattcagttggtatg

SEQ ID NO: 125 - DNA, 33 bp, Homo sapiens
tcaaaagacgtgcaaawcaccccaaaatcgttg

SEQ ID NO: 126 - DNA, 33 bp, Homo sapiens
tcaactaattttacaarccagtaatctgactat

SEQ ID NO: 127 - DNA, 33 bp, Homo sapiens
tcacttatacctcagamatgaaagcagcaccca

SEQ ID NO: 128 - DNA, 33 bp, Homo sapiens
tcagataaacaatgaaygacattttcgtataag

SEQ ID NO: 129 - DNA, 33 bp, Homo sapiens
tcagatcaaaagatgcsaacgtgctgtaatgcc

SEQ ID NO: 130 - DNA, 33 bp, Homo sapiens
tcagatcctaacttacraggtgtgtgagctagc

SEQ ID NO: 131 - DNA, 33 bp, Homo sapiens
tcatagagatgtttacratttggaaaactatcc

SEQ ID NO: 132 - DNA, 33 bp, Homo sapiens
tcatatgccaagacagmaaaagaaccgcaatga

SEQ ID NO: 133 - DNA, 33 bp, Homo sapiens
tcatggctgtgataackgtcattattttgttcc

SEQ ID NO: 134 - DNA, 33 bp, Homo sapiens
tcattcatttcctctaygtgatttggagccctt

SEQ ID NO: 135 - DNA, 33 bp, Homo sapiens
tccaacagaagaaacarcagaactgcttaaggc

SEQ ID NO: 136 - DNA, 33 bp, Homo sapiens
cttccacactttgagcrcattcactctgcagtt

SEQ ID NO: 137 - DNA, 33 bp, Homo sapiens
tccatagacttgcatcragagaagaaggagagg

SEQ ID NO: 138 - DNA, 33 bp, Homo sapiens
tcccaagcttgctcccwctcctgtgcaggccat

SEQ ID NO: 139 - DNA, 33 bp, Homo sapiens
tcccatgacccactaartatggatcccaacact

SEQ ID NO: 140 - DNA, 33 bp, Homo sapiens
tcccatgcctcacatayctccaaggggctctgt

SEQ ID NO: 141 - DNA, 33 bp, Homo sapiens
tcccattgactttgacyggagacatttataggg

SEQ ID NO: 142 - DNA, 33 bp, Homo sapiens
tcctatctcaagacaargagctgcttccaagaa

SEQ ID NO: 143 - DNA, 33 bp, Homo sapiens
tcctcctacatgattascaggtttgaatttttg

SEQ ID NO: 144 - DNA, 33 bp, Homo sapiens
tcctgaacagatatgaygattgttctgccttaa

SEQ ID NO: 145 - DNA, 33 bp, Homo sapiens
tcctgaagattctgaamtattccaaaggattag

SEQ ID NO: 146 - DNA, 33 bp, Homo sapiens
tccttaagcagaataayatcagatcaagtgtac

SEQ ID NO: 147 - DNA, 33 bp, Homo sapiens
tccttatgagccttgcrgacaaagaggtatcct

SEQ ID NO: 148 - DNA, 33 bp, Homo sapiens
tccttgacctgcttaartctggcttctttttcc

SEQ ID NO: 149 - DNA, 33 bp, Homo sapiens
tccttgtaggtctttamggagtctccacactgt

SEQ ID NO: 150 - DNA, 33 bp, Homo sapiens
tcctttttgtcttaaaytctgtttgaatgctct

SEQ ID NO: 151 - DNA, 33 bp, Homo sapiens
tcgattgtgttgcatgratttgtgcaatataaa

SEQ ID NO: 152 - DNA, 33 bp, Homo sapiens
tcgtagccctcataaartcatagtgcaatgcat

SEQ ID NO: 153 - DNA, 33 bp, Homo sapiens
tctaaattaatccttgmaatcctatgaggtagg

SEQ ID NO: 154 - DNA, 33 bp, Homo sapiens
tctaacagattttacartgactagcttaagaca

SEQ ID NO: 155 - DNA, 33 bp, Homo sapiens
tctaactagtcggtggwaagacgtccagtcatc

SEQ ID NO: 156 - DNA, 33 bp, Homo sapiens
tctactgttgacaggaytccagagtaaagaatc

SEQ ID NO: 157 - DNA, 33 bp, Homo sapiens
tctagtttccttttcartccagcaaagtccttt

SEQ ID NO: 158 - DNA, 33 bp, Homo sapiens
tctattaaaaaggtagyctaagctgagctgggg

SEQ ID NO: 159 - DNA, 33 bp, Homo sapiens
tctcactcccaagtaaycactattctcatttcc

SEQ ID NO: 160 - DNA, 33 bp, Homo sapiens
tctctccaaaccattargacccctcttctccca

SEQ ID NO: 161 - DNA, 33 bp, Homo sapiens
tctgatcgacgctacartgaggatgaaccttga

SEQ ID NO: 162 - DNA, 33 bp, Homo sapiens
tctgggttcaaattcargttgtcctctgcccct

SEQ ID NO: 163 - DNA, 33 bp, Homo sapiens
tctggtaagaatttcasaattccaggacgtctc

SEQ ID NO: 164 - DNA, 33 bp, Homo sapiens
tctgtcaggatcagacratgcacggtaaacgtc

SEQ ID NO: 165 - DNA, 33 bp, Homo sapiens
tctgtgtgtgtaaatgraggccttttcccttgt

SEQ ID NO: 166 - DNA, 33 bp, Homo sapiens
tcttgctatttgccgayattgctaaggctttgt

SEQ ID NO: 167 - DNA, 33 bp, Homo sapiens
tctttgcttcttaggarcaggataattgatttg

SEQ ID NO: 168 - DNA, 33 bp, Homo sapiens
tgaaagagtgctctgasagattaggagtgcatc

SEQ ID NO: 169 - DNA, 33 bp, Homo sapiens
tgaagagttgagataasagacaagaacgagaaa

SEQ ID NO: 170 - DNA, 33 bp, Homo sapiens
tgaagcagccacaagartctaaactgtaagaac

SEQ ID NO: 171 - DNA, 33 bp, Homo sapiens
tgaatcaacaactgacygtataaaactatgctt

SEQ ID NO: 172 - DNA, 33 bp, Homo sapiens
tgacaatattgccaagscttgctactgaaatgt

SEQ ID NO: 173 - DNA, 33 bp, Homo sapiens
tgacttaatgagtagcraatgtgaccaagaggt

SEQ ID NO: 174 - DNA, 33 bp, Homo sapiens
tgagagacggccatgaygtaaccaaccaggggt

SEQ ID NO: 175 - DNA, 33 bp, Homo sapiens
tgaggtgtaatctaacyagtagacaaatggcat

SEQ ID NO: 176 - DNA, 33 bp, Homo sapiens
tgagtatcactacatawctggctgtagcaacgt

SEQ ID NO: 177 - DNA, 33 bp, Homo sapiens
tgagtcctaaagagcastatttcacgatttggc

SEQ ID NO: 178 - DNA, 33 bp, Homo sapiens
tgagttccagaaggcaygacagaaggttctggg

SEQ ID NO: 179 - DNA, 33 bp, Homo sapiens
tgataaaagactcttgraaggactagtctcata

SEQ ID NO: 180 - DNA, 33 bp, Homo sapiens
tgattcactccaggcaygaatattcttcctttc

SEQ ID NO: 181 - DNA, 33 bp, Homo sapiens
tgcaaaggagaaatgarggacacaataagaaaa

SEQ ID NO: 182 - DNA, 33 bp, Homo sapiens
tgcacacaacacaggcraggtagtaatatttag

SEQ ID NO: 183 - DNA, 33 bp, Homo sapiens
tgcagttactttggaartcaattctgcaatttc

SEQ ID NO: 184 - DNA, 33 bp, Homo sapiens
tgcccttgagatccccrcatatcaggcatgtga

SEQ ID NO: 185 - DNA, 33 bp, Homo sapiens
tgcgtgtctctctccaytcccaactaaacccaa

SEQ ID NO: 186 - DNA, 33 bp, Homo sapiens
tgctaagcttttataartgatgtcctcttatca

SEQ ID NO: 187 - DNA, 33 bp, Homo sapiens
tgctagatgatagcaaytgattttggagcaaca

SEQ ID NO: 188 - DNA, 33 bp, Homo sapiens
tgctagtaggaagggasataagtacagcacttt

SEQ ID NO: 189 - DNA, 33 bp, Homo sapiens
tgctagtattgttcaartctatatccttactgt

SEQ ID NO: 190 - DNA, 33 bp, Homo sapiens
tgctgagtgaacacaarcagtaacctatgttct

SEQ ID NO: 191 - DNA, 33 bp, Homo sapiens
tgctgtatatttgacamtgaatgactgtcatct

SEQ ID NO: 192 - DNA, 33 bp, Homo sapiens
tgctgtctctaaattamagctctgtttcctggg

SEQ ID NO: 193 - DNA, 33 bp, Homo sapiens
tgcttgaatactgctamagataaaaatggcaaa

SEQ ID NO: 194 - DNA, 33 bp, Homo sapiens
tggaaacaaaagctgtraaataaattctgcccc

SEQ ID NO: 195 - DNA, 33 bp, Homo sapiens
tggaaatcatattgagwcactaccaagatgggc

SEQ ID NO: 196 - DNA, 33 bp, Homo sapiens
tggaacgtagttaggcrcattagtcatgagata

SEQ ID NO: 197 - DNA, 33 bp, Homo sapiens
tggaagccatgatgccrattagctaacaccaga

SEQ ID NO: 198 - DNA, 33 bp, Homo sapiens
tggaatgacgtcagaaygtgttgagaatttggg

SEQ ID NO: 199 - DNA, 33 bp, Homo sapiens
tggacaaaagagagagwataggcgtgtatcata

SEQ ID NO: 200 - DNA, 33 bp, Homo sapiens
tggacagctttgaagarcactggagagcgacgt

SEQ ID NO: 201 - DNA, 33 bp, Homo sapiens
tggagcttcctactcaygttgatttatgtctca

SEQ ID NO: 202 - DNA, 33 bp, Homo sapiens
tggatcttgttgttacyatggatgacatttgtc

SEQ ID NO: 203 - DNA, 33 bp, Homo sapiens
tggcaagaccttagcartgattaaaaggtactt

SEQ ID NO: 204 - DNA, 33 bp, Homo sapiens
tggcagacagtttgaargcccaacaaaaatgtg

SEQ ID NO: 205 - DNA, 33 bp, Homo sapiens
tggctcatactcaccargctgtgtccagagtct

SEQ ID NO: 206 - DNA, 33 bp, Homo sapiens
tggctttgataattccyaggttctccataaatc

SEQ ID NO: 207 - DNA, 33 bp, Homo sapiens
tggggtttatggaagcrccaaaacatgatgtag

SEQ ID NO: 208 - DNA, 33 bp, Homo sapiens
tggtctgaggcagtttmaaaattgagagacagt

SEQ ID NO: 209 - DNA, 33 bp, Homo sapiens
tggtgatgaagccagarcgtaaacagaatgatt

SEQ ID NO: 210 - DNA, 33 bp, Homo sapiens
tggtgggttccacctcrattgccaactttttag

SEQ ID NO: 211 - DNA, 33 bp, Homo sapiens
tggttaaccaagataaytgttgcctctatttgg

SEQ ID NO: 212 - DNA, 33 bp, Homo sapiens
tggttttggagaaggargatggctaggaactaa

SEQ ID NO: 213 - DNA, 33 bp, Homo sapiens
tggttttgtactttcaygttcaattccattgac

SEQ ID NO: 214 - DNA, 33 bp, Homo sapiens
tgtaacacaggtatgayaattttggacacagct

SEQ ID NO: 215 - DNA, 33 bp, Homo sapiens
tgtaagcatcaggtaaytcattcgaaagctaga

SEQ ID NO: 216 - DNA, 33 bp, Homo sapiens
tgtacactgaagaatayagaaggcagctgggcc

SEQ ID NO: 217 - DNA, 33 bp, Homo sapiens
tgtacatagatgaaacmcaccaattaaaacgca

SEQ ID NO: 218 - DNA, 33 bp, Homo sapiens
tgtagttatcactcaayttagccaattatatct

SEQ ID NO: 219 - DNA, 33 bp, Homo sapiens
tgtcggattttaggagsctcactacagagggca

SEQ ID NO: 220 - DNA, 33 bp, Homo sapiens
tgtctccaaaataaaamtaactaggcacagtgg

SEQ ID NO: 221 - DNA, 33 bp, Homo sapiens
tgtctccttgccgttamaagaaagtagtgctgt

SEQ ID NO: 222 - DNA, 33 bp, Homo sapiens
tgtcttgtatctcttgyaggatgtattagtcag

SEQ ID NO: 223 - DNA, 33 bp, Homo sapiens
tgtgataaaattctatsaacccagaaatcacat

SEQ ID NO: 224 - DNA, 33 bp, Homo sapiens
tgtgcagtggatttccrgaaaatgttgtctttt

SEQ ID NO: 225 - DNA, 33 bp, Homo sapiens
tgtgcatcatggtaccmcaacgatgaaagtcaa

SEQ ID NO: 226 - DNA, 33 bp, Homo sapiens
tgtggaaagcagatgaygattacactgttaaga

SEQ ID NO: 227 - DNA, 33 bp, Homo sapiens
tgtggatatatgaagtkaatgtagtgacttatt

SEQ ID NO: 228 - DNA, 33 bp, Homo sapiens
tgtggttgatggataarttagccagttagaggc

SEQ ID NO: 229 - DNA, 33 bp, Homo sapiens
tgttaccaatgctgaastcttgcttaattgata

SEQ ID NO: 230 - DNA, 33 bp, Homo sapiens
tgttataaactgcaaarctaaaagatagcagag

SEQ ID NO: 231 - DNA, 33 bp, Homo sapiens
tgtttagagcttctccraggacttaaaatgaga

SEQ ID NO: 232 - DNA, 33 bp, Homo sapiens
ttaaataagccttacayaaaaaactatcaacaa

SEQ ID NO: 233 - DNA, 33 bp, Homo sapiens
ttaaatggcacagtaartacaagctaaggaagg

SEQ ID NO: 234 - DNA, 33 bp, Homo sapiens
ttaaatggccctcaaargatactcctcttacaa

SEQ ID NO: 235 - DNA, 33 bp, Homo sapiens
ttaacatcgaaacatgkaagtctcagttacaca

SEQ ID NO: 236 - DNA, 33 bp, Homo sapiens
ttaagtcacttgcccargattattcaggacgta

SEQ ID NO: 237 - DNA, 33 bp, Homo sapiens
ttacgtgctcccacgayggtatctgccatacat

SEQ ID NO: 238 - DNA, 33 bp, Homo sapiens
ttactactaaataaaaygtcgtaatgaaattca

SEQ ID NO: 239 - DNA, 33 bp, Homo sapiens
ttagaggtatgacataratgttctctttcactc

SEQ ID NO: 240 - DNA, 33 bp, Homo sapiens
ttagctatttccatcaygggagaaaatgacatc

SEQ ID NO: 241 - DNA, 33 bp, Homo sapiens
ttatagaagcaattgayacatttggaaaaatca

SEQ ID NO: 242 - DNA, 33 bp, Homo sapiens
ttatctctccaaactgyatttcattttagcagt

SEQ ID NO: 243 - DNA, 33 bp, Homo sapiens
ttattagggatacaagrccaaaatagaaaaata

SEQ ID NO: 244 - DNA, 33 bp, Homo sapiens
ttatttccagtaaaaasaaggcatagaaattcc

SEQ ID NO: 245 - DNA, 33 bp, Homo sapiens
ttcatgttcaatctcargtaggacacagcctgt

SEQ ID NO: 246 - DNA, 33 bp, Homo sapiens
ttccaatcagtagccayatttggtcctcatagg

SEQ ID NO: 247 - DNA, 33 bp, Homo sapiens
ttcctagttatgcaggraattaattcgggggac

SEQ ID NO: 248 - DNA, 33 bp, Homo sapiens
ttcctttcttcattcartaaacatccacggagc

SEQ ID NO: 249 - DNA, 33 bp, Homo sapiens
ttctatgcatctttcargacgtaacccaaattt

SEQ ID NO: 250 - DNA, 33 bp, Homo sapiens
ttctgattatctgggakagtgaagaactccaga

SEQ ID NO: 251 - DNA, 33 bp, Homo sapiens
ttctgcatctcggaaayggcctatcttcttaag

SEQ ID NO: 252 - DNA, 33 bp, Homo sapiens
ttcttcaaaggcttcasataaattaagacataa

SEQ ID NO: 253 - DNA, 33 bp, Homo sapiens
ttgagcaaatcttttayggcagttttcctcata

SEQ ID NO: 254 - DNA, 33 bp, Homo sapiens
ttgccgtccacagcagkctactgacgaaaaacg

SEQ ID NO: 255 - DNA, 33 bp, Homo sapiens
ttgcttcctgtaaaaayttatactgtacagtta

SEQ ID NO: 256 - DNA, 33 bp, Homo sapiens
ttggagtgcagctacargaacccggttcactgc

SEQ ID NO: 257 - DNA, 33 bp, Homo sapiens
ttggagttccatagcaygataattttcagtttt

SEQ ID NO: 258 - DNA, 33 bp, Homo sapiens
ttggctttctgttgaakacatcatttgtggaat

SEQ ID NO: 259 - DNA, 33 bp, Homo sapiens
ttgtaatggttgtttcycattccggttgtttat

SEQ ID NO: 260 - DNA, 33 bp, Homo sapiens
ttgtcaattttagagaygttagatgaatttagt

SEQ ID NO: 261 - DNA, 33 bp, Homo sapiens
ttgtgagatctcctaastcagattctaaatctc

SEQ ID NO: 262 - DNA, 33 bp, Homo sapiens
tttaaagtggaagggaytccaaggttcgcctca

SEQ ID NO: 263 - DNA, 33 bp, Homo sapiens
tttaagttgcaaaaccraaaagtatgttactga

SEQ ID NO: 264 - DNA, 33 bp, Homo sapiens
tttagaaaccatgagargtgagcatcagtggag

SEQ ID NO: 265 - DNA, 33 bp, Homo sapiens
tttagacatgacacackgtatatgaaaaaggac

SEQ ID NO: 266 - DNA, 33 bp, Homo sapiens
tttaggtcttggctcaratgaaagctcctcata

SEQ ID NO: 267 - DNA, 33 bp, Homo sapiens
tttatacacagatccaygaggaagctgcctctt

SEQ ID NO: 268 - DNA, 33 bp, Homo sapiens
tttatgaccatgaatayctattgtttagctccc

SEQ ID NO: 269 - DNA, 33 bp, Homo sapiens
tttatgggaggatgaawtcagtataaagatagc

SEQ ID NO: 270 - DNA, 33 bp, Homo sapiens
tttcaaagacctgatastaactagagaaagaca

SEQ ID NO: 271 - DNA, 33 bp, Homo sapiens
tttcaaatggtgtgccraagtttttgaaggaga

SEQ ID NO: 272 - DNA, 33 bp, Homo sapiens
tttccataggcttctcyaccgttctacatctat

SEQ ID NO: 273 - DNA, 33 bp, Homo sapiens
tttcggcagcctccccyagctgatcatcatgta

SEQ ID NO: 274 - DNA, 33 bp, Homo sapiens
tttgaaacgtaacttgraagggctttgaaatgc

SEQ ID NO: 275 - DNA, 33 bp, Homo sapiens
tttgatgaaaaatttcsactaagcgtgctggca

SEQ ID NO: 276 - DNA, 33 bp, Homo sapiens
tttgcaatagctacaayggttataaaatactta

SEQ ID NO: 277 - DNA, 33 bp, Homo sapiens
tttgctctagaaatacraaagatgtctcttaga

SEQ ID NO: 278 - DNA, 33 bp, Homo sapiens
tttggatgctaatctgractgtggtgactgcac

SEQ ID NO: 279 - DNA, 33 bp, Homo sapiens
tttgtagtcttagaacyaggatgctttacattt

SEQ ID NO: 280 - DNA, 33 bp, Homo sapiens
tttgtcaagaaatccartaatacatcagcgacg

SEQ ID NO: 281 - DNA, 33 bp, Homo sapiens
tttgttgttgttcaaaytattaactcttagctc

SEQ ID NO: 282 - DNA, 33 bp, Homo sapiens
tttgtttggaagctccrgcctagagtgaagatt

SEQ ID NO: 283 - DNA, 33 bp, Homo sapiens
ttttaacaaggccatgwattaaatatggaaggc

SEQ ID NO: 284 - DNA, 33 bp, Homo sapiens
ttttcagacattcttcrcaaaaaacactgaaca

SEQ ID NO: 285 - DNA, 33 bp, Homo sapiens
ttttggatgagagctgsataatttcccaaaatt

SEQ ID NO: 286 - DNA, 33 bp, Homo sapiens
tttttatttgactttcrattgtgattttctttt

SEQ ID NO: 287 - DNA, 33 bp, Homo sapiens
tttttcatctgtttcargacaatttgtaactgc

SEQ ID NO: 288 - DNA, 33 bp, Homo sapiens
agtagatcgacagtccyatcattttgaaggtca

SEQ ID NO: 289 - DNA, 33 bp, Homo sapiens
ccaaaactcttaccacrgcatgcaaatgtcttc

SEQ ID NO: 290 - DNA, 33 bp, Homo sapiens
gggaacaaggtaataaytgctcctctctatcca

SEQ ID NO: 291 - DNA, 33 bp, Homo sapiens
aatatgctggaaaaaakctattatgatgctgta

SEQ ID NO: 292 - DNA, 33 bp, Homo sapiens
tttagctgtcaagctcrctggtcatctttccct

SEQ ID NO: 293 - DNA, 33 bp, Homo sapiens
ctgtttgcacagaatcyaattttggtgtattta

SEQ ID NO: 294 - DNA, 33 bp, Homo sapiens
tcttgaaatcaaatgcratgcttactgctgaaa

SEQ ID NO: 295 - DNA, 33 bp, Homo sapiens
ctgtgcacaacctgccmctttaaaaacacatat

SEQ ID NO: 296 - DNA, 33 bp, Homo sapiens
atgccaggcacttacayatcttacatagaagca

SEQ ID NO: 297 - DNA, 33 bp, Homo sapiens
gctgtagcaggcattgractcactggcctagtg

SEQ ID NO: 298 - DNA, 33 bp, Homo sapiens
tgtaggcagtgaaaaaygctccctagttttatt

SEQ ID NO: 299 - DNA, 33 bp, Homo sapiens
agtatgtacttaagctsaagtctcatcattgat

SEQ ID NO: 300 - DNA, 33 bp, Homo sapiens
ataggaatttgtctatraagaaatcactgtata

SEQ ID NO: 301 - DNA, 33 bp, Homo sapiens
ttaaacaatggataaawatctgggccgagcacg

SEQ ID NO: 302 - DNA, 33 bp, Homo sapiens
gacagaagaaaaccacrgtattatatacacaat

SEQ ID NO: 303 - DNA, 33 bp, Homo sapiens
ttgccaagccataatayaggatcctgaaaagac

SEQ ID NO: 304 - DNA, 33 bp, Homo sapiens
actttagtttttgccarctgcatatggaatgga

SEQ ID NO: 305 - DNA, 33 bp, Homo sapiens
gaaaaaaatctcaagcrgcaatatagtcattcc

SEQ ID NO: 306 - DNA, 33 bp, Homo sapiens
atctctaactggtgatraagcatcatgaaattc

SEQ ID NO: 307 - DNA, 33 bp, Homo sapiens
tacaatatcttgtgcayagctacctgcctgtag

SEQ ID NO: 308 - DNA, 33 bp, Homo sapiens
gtatctcagagtctaaygtgagcctgtttcccg

SEQ ID NO: 309 - DNA, 33 bp, Homo sapiens
gcctttgatgaactcaygagctagttaggtgag

SEQ ID NO: 310 - DNA, 33 bp, Homo sapiens
tgcagtaagacaaacaktatcttaggggacaca

SEQ ID NO: 311 - DNA, 33 bp, Homo sapiens
caaggggatattgaaakctataaggatgaatca

SEQ ID NO: 312 - DNA, 33 bp, Homo sapiens
ctagcagaaatgccaartctttgggtcagagtt

SEQ ID NO: 313 - DNA, 33 bp, Homo sapiens
ggcactatgactaaaamaatgcacatcccctaa

SEQ ID NO: 314 - DNA, 33 bp, Homo sapiens
atacttaaaatcacagmaagttagagactgaaa

SEQ ID NO: 315 - DNA, 33 bp, Homo sapiens
tgttattgatgtgtagraattctttgtataata

SEQ ID NO: 316 - DNA, 33 bp, Homo sapiens
ggttgcaataaaagaastgatggcaaatggacc

SEQ ID NO: 317 - DNA, 33 bp, Homo sapiens
ggcatcttagccctcaygccgtctggtgggtgg

SEQ ID NO: 318 - DNA, 33 bp, Homo sapiens
aatttaggcaactgaartgatttaacaaatact

SEQ ID NO: 319 - DNA, 33 bp, Homo sapiens
agagtttgtcacaaagraaatgttcaatgttgg

SEQ ID NO: 320 - DNA, 33 bp, Homo sapiens
gtagttgctaccaacaraaatttccacagtgat

SEQ ID NO: 321 - DNA, 33 bp, Homo sapiens
cttatgattggcttcayagccttacactcagtt

SEQ ID NO: 322 - DNA, 33 bp, Homo sapiens
tcacactgggatggaaytatggaacctatgccc

SEQ ID NO: 323 - DNA, 33 bp, Homo sapiens
ttcctccacttgaggaycttgttgttagagttg

SEQ ID NO: 324 - DNA, 33 bp, Homo sapiens
tcacttctcatgatgcrgattttgatgcaattt

SEQ ID NO: 325 - DNA, 33 bp, Homo sapiens
aacattctgtacctgaygtccaaaaaacaaaga

SEQ ID NO: 326 - DNA, 33 bp, Homo sapiens
ggaagcaagatcaaccrcagtttgcccgggcat

SEQ ID NO: 327 - DNA, 33 bp, Homo sapiens
cataaaacatggatgaygtataagttgatattt

SEQ ID NO: 328 - DNA, 33 bp, Homo sapiens
tgtcttaacttcacccracttcaggcatttata

SEQ ID NO: 329 - DNA, 33 bp, Homo sapiens
ggtagtagggcaatggyattatggcagaaggtg

SEQ ID NO: 330 - DNA, 33 bp, Homo sapiens
caaaatccagattacarattggatgtggtatta

SEQ ID NO: 331 - DNA, 33 bp, Homo sapiens
ggtgccaagctagtcartcagtggcaaagctca

SEQ ID NO: 332 - DNA, 33 bp, Homo sapiens
tctcagctgtgataaaktgacatgagctagata

SEQ ID NO: 333 - DNA, 33 bp, Homo sapiens
accaagaaaatcaacartgagaccatcaattta

SEQ ID NO: 334 - DNA, 33 bp, Homo sapiens
aagtgtatttaccatcragttataaagcttttc

SEQ ID NO: 335 - DNA, 33 bp, Homo sapiens
cgcaggctgtgctttgyaaggggttgatagaat

SEQ ID NO: 336 - DNA, 33 bp, Homo sapiens
tttaagcttggagacaycctgttaatttattta

SEQ ID NO: 337 - DNA, 33 bp, Homo sapiens
cttcttgacaactctcratgtgctactgagaaa

SEQ ID NO: 338 - DNA, 33 bp, Homo sapiens
tgcagcagccttatgakgcagaacaggctgggt

SEQ ID NO: 339 - DNA, 33 bp, Homo sapiens
agctcttgggaatctcrgagacagagttatcca

SEQ ID NO: 340 - DNA, 33 bp, Homo sapiens
agttttattacttacaratcagtagcaagggac

SEQ ID NO: 341 - DNA, 33 bp, Homo sapiens
aaggtcaccaagttgarcatgtatatggcacag

SEQ ID NO: 342 - DNA, 33 bp, Homo sapiens
gatgatgcctttaacaragagagaggatgagaa

SEQ ID NO: 343 - DNA, 33 bp, Homo sapiens
tctcactctttcctccrcaaacagaggagtctc

SEQ ID NO: 344 - DNA, 33 bp, Homo sapiens
ctgaacatagtcaagayggcaattctctccaaa

SEQ ID NO: 345 - DNA, 33 bp, Homo sapiens
taacttcctctttcaayttaccatgtaattcct

SEQ ID NO: 346 - DNA, 33 bp, Homo sapiens
aagtaaatatgtttagraggaaaatccgtacaa

SEQ ID NO: 347 - DNA, 33 bp, Homo sapiens
agagtaagtgacttccwattgaaaaagatagct

SEQ ID NO: 348 - DNA, 33 bp, Homo sapiens
gtctttatcctccaaakgccctaatttggcccc

SEQ ID NO: 349 - DNA, 33 bp, Homo sapiens
ccaaaatcaaaagcaarcatccattgtacaagc

SEQ ID NO: 350 - DNA, 33 bp, Homo sapiens
tgtcagatctgcggaamgatgagtagaatgggt

SEQ ID NO: 351 - DNA, 33 bp, Homo sapiens
tcacagggctaataacrggagctttggccaaca

SEQ ID NO: 352 - DNA, 33 bp, Homo sapiens
gctaagggccttcaaartttctattgctttaca

SEQ ID NO: 353 - DNA, 33 bp, Homo sapiens
ttagttttttctagccmagcaaagttcctgaac

SEQ ID NO: 354 - DNA, 33 bp, Homo sapiens
catggaggcaaactacrgtagctgattaccatt

SEQ ID NO: 355 - DNA, 33 bp, Homo sapiens
atagccctagtacagcraaagaagtggatggag

SEQ ID NO: 356 - DNA, 33 bp, Homo sapiens
ttaaagttgttaagaayaagggctactttaaga

SEQ ID NO: 357 - DNA, 33 bp, Homo sapiens
tttcttgttgccaggartattttcattaacatc

SEQ ID NO: 358 - DNA, 33 bp, Homo sapiens
ggtttaggttttatagyagatgcttcctatttg

SEQ ID NO: 359 - DNA, 33 bp, Homo sapiens
gcagacggttttgagcrgaccacggagttttga

SEQ ID NO: 360 - DNA, 33 bp, Homo sapiens
aataaatctaccctaartgagccattaaaaaca

SEQ ID NO: 361 - DNA, 33 bp, Homo sapiens
tcacttggacactcaayctgaagcagagaatcc

SEQ ID NO: 362 - DNA, 33 bp, Homo sapiens
atctaaagagtttccaragaaagtattaattca

SEQ ID NO: 363 - DNA, 33 bp, Homo sapiens
agatcaaacatgaagaygaggattagttaagac

SEQ ID NO: 364 - DNA, 33 bp, Homo sapiens
gtcactccctgtccaartcaaacctggattctg

SEQ ID NO: 365 - DNA, 33 bp, Homo sapiens
aaagcaggaagattccrgaaagctgggcaccat

SEQ ID NO: 366 - DNA, 33 bp, Homo sapiens
acagatttaaattttcrcaaaatactcttacat

SEQ ID NO: 367 - DNA, 33 bp, Homo sapiens
aaacttagaaattaacmatcttgcacactagta

SEQ ID NO: 368 - DNA, 33 bp, Homo sapiens
tttcccgtactgtagamaactcatcagctcaga

SEQ ID NO: 369 - DNA, 33 bp, Homo sapiens
gtcaggatggctggtgrcaacaatggcccaaat

SEQ ID NO: 370 - DNA, 33 bp, Homo sapiens
attttaaacggtaagakaattttcatacacaca

SEQ ID NO: 371 - DNA, 33 bp, Homo sapiens
atctctaagtataagcrccttattgacaatctc

SEQ ID NO: 372 - DNA, 33 bp, Homo sapiens
taggtctaaaggtaaartccttgtctgctattt

SEQ ID NO: 373 - DNA, 33 bp, Homo sapiens
attgcaacatggtatasctcattataaagcaat

SEQ ID NO: 374 - DNA, 33 bp, Homo sapiens
ccagtgaacatacaaasaaatgactggcatcca

SEQ ID NO: 375 - DNA, 33 bp, Homo sapiens
gtctgttgtatggggargaaaaattgggatttg

SEQ ID NO: 376 - DNA, 33 bp, Homo sapiens
atcccaatacagactcygactaaggcttccctt

SEQ ID NO: 377 - DNA, 33 bp, Homo sapiens
cttcttacaaagtggcyaagggttctaagaata

SEQ ID NO: 378 - DNA, 33 bp, Homo sapiens
agaaatgagttgcccayctaactagggtgatgt

SEQ ID NO: 379 - DNA, 33 bp, Homo sapiens
acctgtaaacagacctsaaaacatagtgttcac

SEQ ID NO: 380 - DNA, 33 bp, Homo sapiens
cggttgtgagggtaagyatacaataatgctagt

SEQ ID NO: 381 - DNA, 33 bp, Homo sapiens
tgcaccccaccagaacrgcttacaaaccaagcg

SEQ ID NO: 382 - DNA, 33 bp, Homo sapiens
agaacaggtattacaayttctagttactaacaa

SEQ ID NO: 383 - DNA, 33 bp, Homo sapiens
aaaaaaatagctaataygttgaggaggagggag

SEQ ID NO: 384 - DNA, 33 bp, Homo sapiens
aaaaaacatcagaggargtatgagcattgtttc

SEQ ID NO: 385 - DNA, 33 bp, Homo sapiens
aaaaaagccacaggagsaaccctgacagagaag

SEQ ID NO: 386 - DNA, 33 bp, Homo sapiens
aaaaacagtcttaagargcgtagtaaacaacag

SEQ ID NO: 387 - DNA, 33 bp, Homo sapiens
aaaacaaaaggtctcawaaagctatcaaacaat

SEQ ID NO: 388 - DNA, 33 bp, Homo sapiens
aaaactactttgagacraatttcttaggccatc

SEQ ID NO: 389 - DNA, 33 bp, Homo sapiens
aaaacttagagttctawagtggacccgaccctt

SEQ ID NO: 390 - DNA, 33 bp, Homo sapiens
aaaataatgtggaaaargtgagtggtatgccca

SEQ ID NO: 391 - DNA, 33 bp, Homo sapiens
aaaatatatgaaagcartactagaaaaagtgag

SEQ ID NO: 392 - DNA, 33 bp, Homo sapiens
aaaatatattcagaacwattcagaggaaaccac

SEQ ID NO: 393 - DNA, 33 bp, Homo sapiens
aaaatatctgcagccaktcaaaatactctcgtg

SEQ ID NO: 394 - DNA, 33 bp, Homo sapiens
aaaatatgttgactaaycataactgaatacaga

SEQ ID NO: 395 - DNA, 33 bp, Homo sapiens
aaaatgaaagtagaacyggatgtggaagaggca

SEQ ID NO: 396 - DNA, 33 bp, Homo sapiens
aaaatggacacatagaytagcaaacctttcttc

SEQ ID NO: 397 - DNA, 33 bp, Homo sapiens
aaaatttgcttcagaakaagagtaaaactgttg

SEQ ID NO: 398 - DNA, 33 bp, Homo sapiens
aaacaccagtccctcartgacaaattttagtta

SEQ ID NO: 399 - DNA, 33 bp, Homo sapiens
aaacatccaggatccamatggctattgggagtg

SEQ ID NO: 400 - DNA, 33 bp, Homo sapiens
aaactgtggctcctttraaagaatagtttctga

SEQ ID NO: 401 - DNA, 33 bp, Homo sapiens
aaagacatgaaaggaartgtagtttggtttgat

SEQ ID NO: 402 - DNA, 33 bp, Homo sapiens
aaagggcctgggctaaktaatgtcagttcagtt

SEQ ID NO: 403 - DNA, 33 bp, Homo sapiens
aaataagagaaaagtayggaaagatgctagcca

SEQ ID NO: 404 - DNA, 33 bp, Homo sapiens
aaatacatgaaatagcmgaagtcatttgttact

SEQ ID NO: 405 - DNA, 33 bp, Homo sapiens
aaatgaaaacacacaarttgaaaatgcacagaa

SEQ ID NO: 406 - DNA, 33 bp, Homo sapiens
aaatgaggaccctgagraattgagtgtttaccc

SEQ ID NO: 407 - DNA, 33 bp, Homo sapiens
aacccagtctcttaacsacgactcattcttcac

SEQ ID NO: 408 - DNA, 33 bp, Homo sapiens
aaccttggtcctctaaytctagatccacgggct

SEQ ID NO: 409 - DNA, 33 bp, Homo sapiens
aactgactggactcaaygaaatcataagcttag

SEQ ID NO: 410 - DNA, 33 bp, Homo sapiens
aactgcagctgcctcayaataaaaggacaggaa

SEQ ID NO: 411 - DNA, 33 bp, Homo sapiens
aagaatgcagagtaggyaatttgtgttctgtcc

SEQ ID NO: 412 - DNA, 33 bp, Homo sapiens
aagacactcagtttcasaggcagaaaacctgga

SEQ ID NO: 413 - DNA, 33 bp, Homo sapiens
aagagaaacttttgagrcaatttactgagctat

SEQ ID NO: 414 - DNA, 33 bp, Homo sapiens
aagagacaaagagagayaaagtagtcaaatgac

SEQ ID NO: 415 - DNA, 33 bp, Homo sapiens
aaggaaatgcagatgastatggtaatgaatgaa

SEQ ID NO: 416 - DNA, 33 bp, Homo sapiens
aagggtagaaggaagakcatgatggtacatttt

SEQ ID NO: 417 - DNA, 33 bp, Homo sapiens
aaggtgctagcctcatsaataggacaattaaaa

SEQ ID NO: 418 - DNA, 33 bp, Homo sapiens
aagtaaaatttcccatraggtgctgaaatccaa

SEQ ID NO: 419 - DNA, 33 bp, Homo sapiens
aagtaaggatctaaaaytggactctgctgtact

SEQ ID NO: 420 - DNA, 33 bp, Homo sapiens
aagtactgaatgtaaasttctctatcagctatc

SEQ ID NO: 421 - DNA, 33 bp, Homo sapiens
aagtgaacaaaaacatragccaaagacaatgac

SEQ ID NO: 422 - DNA, 33 bp, Homo sapiens
aagtttcttcaaaggaktaggcatttataagtt

SEQ ID NO: 423 - DNA, 33 bp, Homo sapiens
aataaacaaattaataycttgagcctgttacag

SEQ ID NO: 424 - DNA, 33 bp, Homo sapiens
aataaatggtctctcaygatattacatctcccc

SEQ ID NO: 425 - DNA, 33 bp, Homo sapiens
aataagtgttctttacrcaccaatggcttccta

SEQ ID NO: 426 - DNA, 33 bp, Homo sapiens
aataatcagttgaaaaygaaaatgtaagatatc

SEQ ID NO: 427 - DNA, 33 bp, Homo sapiens
aataattcctccccaamctctctgtctctctga

SEQ ID NO: 428 - DNA, 33 bp, Homo sapiens
aatagcccaagtataayggtagctgctgtttat

SEQ ID NO: 429 - DNA, 33 bp, Homo sapiens
aatatttttctctaccsgaatccatcagctacc

SEQ ID NO: 430 - DNA, 33 bp, Homo sapiens
aatcagaaattaggtaygaggaaaccaaagctt

SEQ ID NO: 431 - DNA, 33 bp, Homo sapiens
aatgctttcatgggcaytatattgtttagtcat

SEQ ID NO: 432 - DNA, 33 bp, Homo sapiens
aatgtgtgaatcagaartacaatcaagaggtcg

SEQ ID NO: 433 - DNA, 33 bp, Homo sapiens
aatgttgccaatgcaaycaagaaagcctagagt

SEQ ID NO: 434 - DNA, 33 bp, Homo sapiens
aattaaagtaaccacamaatcctgtagctgaca

SEQ ID NO: 435 - DNA, 33 bp, Homo sapiens
acaaatggtgcacaaayaactggactgccacat

SEQ ID NO: 436 - DNA, 33 bp, Homo sapiens
acacagcctatatgccraataaaactaaactat

SEQ ID NO: 437 - DNA, 33 bp, Homo sapiens
acagacatccagttccmcctctttgaaacagct

SEQ ID NO: 438 - DNA, 33 bp, Homo sapiens
acagcttccattttacycatcatccccattttg

SEQ ID NO: 439 - DNA, 33 bp, Homo sapiens
acagcttggctatggtwaccagtcttcagaggg

SEQ ID NO: 440 - DNA, 33 bp, Homo sapiens
acaggaagtgttgacayatatttgcagaacttc

SEQ ID NO: 441 - DNA, 33 bp, Homo sapiens
acaggccctgtgacaaygtctggctgacaaaag

SEQ ID NO: 442 - DNA, 33 bp, Homo sapiens
acatagctaaaaatgakatcaaggactaaatcc

SEQ ID NO: 443 - DNA, 33 bp, Homo sapiens
acatcaatgattgacawgggtaaaagagagaaa

SEQ ID NO: 444 - DNA, 33 bp, Homo sapiens
acatcacagatgatgamagaagtactgtgttct

SEQ ID NO: 445 - DNA, 33 bp, Homo sapiens
ttatcagggaatgggckaactttatccaactgg

SEQ ID NO: 446 - DNA, 33 bp, Homo sapiens
acatcccccaaagcaargtattaaaatgattgt

SEQ ID NO: 447 - DNA, 33 bp, Homo sapiens
acatctcacactaacargcaaattcagatgctg

SEQ ID NO: 448 - DNA, 33 bp, Homo sapiens
acatgagaagggctgasacacatagatttctgt

SEQ ID NO: 449 - DNA, 33 bp, Homo sapiens
acattaaactcttggaygtcaaaaataaacacc

SEQ ID NO: 450 - DNA, 33 bp, Homo sapiens
acattactaccatttcwctcttcatcgggccca

SEQ ID NO: 451 - DNA, 33 bp, Homo sapiens
acatttttaaagtagartaacgcaatattaata

SEQ ID NO: 452 - DNA, 33 bp, Homo sapiens
accctgcaggagattcrctacagcagaaggcat

SEQ ID NO: 453 - DNA, 33 bp, Homo sapiens
accctgcatctaatcargcctccaggtctaact

SEQ ID NO: 454 - DNA, 33 bp, Homo sapiens
accttcaaatggataawggccatagggagctta

SEQ ID NO: 455 - DNA, 33 bp, Homo sapiens
accttgagagtagtgayattcacattaatatta

SEQ ID NO: 456 - DNA, 33 bp, Homo sapiens
accttttggctatcgcraattatgctgctacga

SEQ ID NO: 457 - DNA, 33 bp, Homo sapiens
acgacaagcaggagtaytacaagatgaagggag

SEQ ID NO: 458 - DNA, 33 bp, Homo sapiens
acacgtaatttacttcyaactgttatccaagga

SEQ ID NO: 459 - DNA, 33 bp, Homo sapiens
actaaaatatgatgacraatcttcttcagccat

SEQ ID NO: 460 - DNA, 33 bp, Homo sapiens
actactcagcaacaaartagaatgaggtattga

SEQ ID NO: 461 - DNA, 33 bp, Homo sapiens
actagagtgatgtttcyagaggcccaggaacat

SEQ ID NO: 462 - DNA, 33 bp, Homo sapiens
actatggtattagaaaygctaactacagagatg

SEQ ID NO: 463 - DNA, 33 bp, Homo sapiens
actatgtcatttaaaastcacagaactcctaga

SEQ ID NO: 464 - DNA, 33 bp, Homo sapiens
actccaagtgtgattayggaagagtgacatgta

SEQ ID NO: 465 - DNA, 33 bp, Homo sapiens
actcgattcttttctcmattattgccaaattta

SEQ ID NO: 466 - DNA, 33 bp, Homo sapiens
actctacttttttgggmaatcttgttctctact

SEQ ID NO: 467 - DNA, 33 bp, Homo sapiens
actctcagtcactcaarcaattgtgaaatgtgc

SEQ ID NO: 468 - DNA, 33 bp, Homo sapiens
actctgaaattttgtamcattatggctaatgca

SEQ ID NO: 469 - DNA, 33 bp, Homo sapiens
actgacattttagacaraagagcagaaattcgg

SEQ ID NO: 470 - DNA, 33 bp, Homo sapiens
acttctgagctggccasggaggaaaaagatgtg

SEQ ID NO: 471 - DNA, 33 bp, Homo sapiens
acttggaacaaatctgmactcactttgtgatct

SEQ ID NO: 472 - DNA, 33 bp, Homo sapiens
acttggctttcaacctwactccagctctatagt

SEQ ID NO: 473 - DNA, 33 bp, Homo sapiens
acttggttgtcaggtargtaagcaagaaattct

SEQ ID NO: 474 - DNA, 33 bp, Homo sapiens
actttctgcttttggaygtataagcacagcgtg

SEQ ID NO: 475 - DNA, 33 bp, Homo sapiens
agaaagaggaacagtgraaaatgaaattggtat

SEQ ID NO: 476 - DNA, 33 bp, Homo sapiens
agaaagtagtcagataygctaagttctcagcca

SEQ ID NO: 477 - DNA, 33 bp, Homo sapiens
agaaatagaacttgcakagtaagcgaaaacagt

SEQ ID NO: 478 - DNA, 33 bp, Homo sapiens
agaaggcaaactacatraaacaagttatttttg

SEQ ID NO: 479 - DNA, 33 bp, Homo sapiens
agaatataagggaaaartggctcccagatgcct

SEQ ID NO: 480 - DNA, 33 bp, Homo sapiens
agaatttcttaccgatyagtctctggcctcttt

SEQ ID NO: 481 - DNA, 33 bp, Homo sapiens
agaccagcacacaaaastatcactagaaagtta

SEQ ID NO: 482 - DNA, 33 bp, Homo sapiens
agacgcagcctaagacraaaactgcttcacagg

SEQ ID NO: 483 - DNA, 33 bp, Homo sapiens
agactatgaattcctayatctgccacctgcaag

SEQ ID NO: 484 - DNA, 33 bp, Homo sapiens
agactggcaggcaatarggaccccaaaaatggt

SEQ ID NO: 485 - DNA, 33 bp, Homo sapiens
agactgtaactcaaagwagcttgtggacagagt

SEQ ID NO: 486 - DNA, 33 bp, Homo sapiens
agagaaaattaaaacaktgttggccaagaatgc

SEQ ID NO: 487 - DNA, 33 bp, Homo sapiens
agagaagctaagcttgraaactcagtcatgcaa

SEQ ID NO: 488 - DNA, 33 bp, Homo sapiens
agagactatgcctggcrcctggtcagacagtgt

SEQ ID NO: 489 - DNA, 33 bp, Homo sapiens
agagagctggaaaatamcatggttctttctcct

SEQ ID NO: 490 - DNA, 33 bp, Homo sapiens
agagagtccctactaaygagaaagccctcacca

SEQ ID NO: 491 - DNA, 33 bp, Homo sapiens
agagccattgcagcaastggtttctgacctccc

SEQ ID NO: 492 - DNA, 33 bp, Homo sapiens
agaggaattgcatgacraggcttctgagcagga

SEQ ID NO: 493 - DNA, 33 bp, Homo sapiens
catattttttgaataakgatatgtccagtggtt

SEQ ID NO: 494 - DNA, 33 bp, Homo sapiens
agatacacctagaaacmcatatactagctgtcc

SEQ ID NO: 495 - DNA, 33 bp, Homo sapiens
agatattgaacaccackgattttaaaacacaag

SEQ ID NO: 496 - DNA, 33 bp, Homo sapiens
agatggttatatgaccycaattgcaaagatgat

SEQ ID NO: 497 - DNA, 33 bp, Homo sapiens
tcattgcttagcttagratttgactgaagagac

SEQ ID NO: 498 - DNA, 33 bp, Homo sapiens
agcaacagactaggaaygctgtcaaaaaaaact

SEQ ID NO: 499 - DNA, 33 bp, Homo sapiens
agcagagaaatggacaygcatggtgaatctggc

SEQ ID NO: 500 - DNA, 33 bp, Homo sapiens
agcagccagaggtctaratgtcatttgttcatt

SEQ ID NO: 501 - DNA, 33 bp, Homo sapiens
agcatacacttttctakgccgttttacaaggtg

SEQ ID NO: 502 - DNA, 33 bp, Homo sapiens
agcatcacaccattcarggtgaaagcactcgca

SEQ ID NO: 503 - DNA, 33 bp, Homo sapiens
agcatcctgaatgacasagataaggaccatatt

SEQ ID NO: 504 - DNA, 33 bp, Homo sapiens
agcatgtaacgctggayggatgtaatgcctaga

SEQ ID NO: 505 - DNA, 33 bp, Homo sapiens
agcattgcctgcatgayagtaacagtatcaact

SEQ ID NO: 506 - DNA, 33 bp, Homo sapiens
agcccaaaagactggcrgacactcagaaaagcc

SEQ ID NO: 507 - DNA, 33 bp, Homo sapiens
agcccatgaggcaaaaytgatgtctcaccttac

SEQ ID NO: 508 - DNA, 33 bp, Homo sapiens
agcccgcaaatgacacsagctaagcattgtgcg

SEQ ID NO: 509 - DNA, 33 bp, Homo sapiens
agcctacttccaatgamcgtgagatctgaaaga

SEQ ID NO: 510 - DNA, 33 bp, Homo sapiens
agctacagtgacttggracaaacacagctgaga

SEQ ID NO: 511 - DNA, 33 bp, Homo sapiens
agctgtcaaagtccaamgcagtgtctaggcatg

SEQ ID NO: 512 - DNA, 33 bp, Homo sapiens
agcttcattaactgacrggacagcagaaaaggc

SEQ ID NO: 513 - DNA, 33 bp, Homo sapiens
agcttgtcagactagaygaaaaagcaagacctg

SEQ ID NO: 514 - DNA, 33 bp, Homo sapiens
aggaagtggcaactcasctgggatctaaagaat

SEQ ID NO: 515 - DNA, 33 bp, Homo sapiens
aggaatggtgagtaaarctgctgcccttagcaa

SEQ ID NO: 516 - DNA, 33 bp, Homo sapiens
aggactgaatgatatascatcccgaaatatgct

SEQ ID NO: 517 - DNA, 33 bp, Homo sapiens
aggaggagatataagasgtgataccaggagagt

SEQ ID NO: 518 - DNA, 33 bp, Homo sapiens
aggcattttaaggaaaycgatcttggtgtgttc

SEQ ID NO: 519 - DNA, 33 bp, Homo sapiens
aggcctcacaattaaarctgactacaaaaagaa

SEQ ID NO: 520 - DNA, 33 bp, Homo sapiens
aggcgcaatgattttayggtagaggtgcttttg

SEQ ID NO: 521 - DNA, 33 bp, Homo sapiens
aggctatctgaaaatcyagagttcatagatgcc

SEQ ID NO: 522 - DNA, 33 bp, Homo sapiens
aggctccagcttttccrctacgtctgctgaggc

SEQ ID NO: 523 - DNA, 33 bp, Homo sapiens
agggccttatgtgttaygttaagcaccaggaac

SEQ ID NO: 524 - DNA, 33 bp, Homo sapiens
aggggagacaaatacarctgcttgaccaggttc

SEQ ID NO: 525 - DNA, 33 bp, Homo sapiens
aggggttccatgagtgwatacctttgtcaaaat

SEQ ID NO: 526 - DNA, 33 bp, Homo sapiens
agggtgcacagtttaaytgttcttggatgaaag

SEQ ID NO: 527 - DNA, 33 bp, Homo sapiens
aggtcttgcctggtccrcagtctcttcaacttt

SEQ ID NO: 528 - DNA, 33 bp, Homo sapiens
aggtggaccttcagacratcttaaagtgtcagt

SEQ ID NO: 529 - DNA, 33 bp, Homo sapiens
agtaaagagtggttgayagtggagctcagaagg

SEQ ID NO: 530 - DNA, 33 bp, Homo sapiens
agtaaagtgaaaaacarccgtacctggaatact

SEQ ID NO: 531 - DNA, 33 bp, Homo sapiens
agtaatcactcactcargttccttaatcacatc

SEQ ID NO: 532 - DNA, 33 bp, Homo sapiens
agtatgacaggatcagwccaggaggcttgcatg

SEQ ID NO: 533 - DNA, 33 bp, Homo sapiens
agtatggacataggaaragatgcaagcaaactg

SEQ ID NO: 534 - DNA, 33 bp, Homo sapiens
agtcattcaaggtctckcttcagcttgcctctc

SEQ ID NO: 535 - DNA, 33 bp, Homo sapiens
agtctaaaagaggccaytccaataaccaaggat

SEQ ID NO: 536 - DNA, 33 bp, Homo sapiens
agtctgagtttaatcaycctgcaatactgtcct

SEQ ID NO: 537 - DNA, 33 bp, Homo sapiens
agtgaaacacacataartgagccatgcagagag

SEQ ID NO: 538 - DNA, 33 bp, Homo sapiens
agtgagacatggatgayacccacacttcactct

SEQ ID NO: 539 - DNA, 33 bp, Homo sapiens
agtgagagaacatgtakaaggcaggcctggcac

SEQ ID NO: 540 - DNA, 33 bp, Homo sapiens
agtgatagaaataacaytgtatctgggttcatt

SEQ ID NO: 541 - DNA, 33 bp, Homo sapiens
agagttctgctactaawatatgttagaattgtg

SEQ ID NO: 542 - DNA, 33 bp, Homo sapiens
agttctaaaaatcatamggcagaaattgaaaaa

SEQ ID NO: 543 - DNA, 33 bp, Homo sapiens
agtttgcaagaaatgcrcaaagtaactgtaaat

SEQ ID NO: 544 - DNA, 33 bp, Homo sapiens
ataaacaagctgttccracttttgaacaaatcc

SEQ ID NO: 545 - DNA, 33 bp, Homo sapiens
ataaactggcagttcayagaaaggtatcttcat

SEQ ID NO: 546 - DNA, 33 bp, Homo sapiens
ataaatgtgtgacatastaatttacaggagatt

SEQ ID NO: 547 - DNA, 33 bp, Homo sapiens
ataaatttaagagagcrcggcaggttttggaat

SEQ ID NO: 548 - DNA, 33 bp, Homo sapiens
ataacctagatagatgraaaaccattatttctg

SEQ ID NO: 549 - DNA, 33 bp, Homo sapiens
ataatattcttgctttwaaaatgtagctctggc

SEQ ID NO: 550 - DNA, 33 bp, Homo sapiens
atagatgcagaatggaytaggtgtgcgataaat

SEQ ID NO: 551 - DNA, 33 bp, Homo sapiens
ataggtttgtgttttayccttgatcaattttga

SEQ ID NO: 552 - DNA, 33 bp, Homo sapiens
atatactgtagacttayaataaaatgagctaga

SEQ ID NO: 553 - DNA, 33 bp, Homo sapiens
atatcaaaaagttgaaygtcccaatggacaatt

SEQ ID NO: 554 - DNA, 33 bp, Homo sapiens
atattcaaaaaaggtcratttggctttccattt

SEQ ID NO: 555 - DNA, 33 bp, Homo sapiens
atcaaaagaaggcaaartactctcatttttgtg

SEQ ID NO: 556 - DNA, 33 bp, Homo sapiens
atcaggtcatctggacraatcttgaaacacatt

SEQ ID NO: 557 - DNA, 33 bp, Homo sapiens
atcatggccaatttcaygctactaacctgatgc

SEQ ID NO: 558 - DNA, 33 bp, Homo sapiens
atccagtacatgatccrccgtgacaatgagtag

SEQ ID NO: 559 - DNA, 33 bp, Homo sapiens
atccctgcaagaccatyaatgtaatgaacagaa

SEQ ID NO: 560 - DNA, 33 bp, Homo sapiens
atcctgtggaaccaatsataagtaagaaagaaa

SEQ ID NO: 561 - DNA, 33 bp, Homo sapiens
atctcagtggttattargttgccagacacatgg

SEQ ID NO: 562 - DNA, 33 bp, Homo sapiens
atctgtgtgtggctaasgatgaggatacagaga

SEQ ID NO: 563 - DNA, 33 bp, Homo sapiens
tgaaatttattctgcasgaaatgggcaaaccaa

SEQ ID NO: 564 - DNA, 33 bp, Homo sapiens
atctttgaaactttacraggaatgccacaggtc

SEQ ID NO: 565 - DNA, 33 bp, Homo sapiens
atgacgtgagaagaaayagaaacacagagaaat

SEQ ID NO: 566 - DNA, 33 bp, Homo sapiens
atgataacaacgatgamgtatttccaagttcgg

SEQ ID NO: 567 - DNA, 33 bp, Homo sapiens
atgatcaatcctttaamaaccaagtatgtatta

SEQ ID NO: 568 - DNA, 33 bp, Homo sapiens
atgccagggctgggtaygcatagtccatgttgc

SEQ ID NO: 569 - DNA, 33 bp, Homo sapiens
atggaagatggttaaayggggaaaattgcattc

SEQ ID NO: 570 - DNA, 33 bp, Homo sapiens
atgggtatattgcataygagtagggatttggct

SEQ ID NO: 571 - DNA, 33 bp, Homo sapiens
atggtaactatgcagasatttccaagcaattga

SEQ ID NO: 572 - DNA, 33 bp, Homo sapiens
atgcaaatggatccaayacttggttagccaata

SEQ ID NO: 573 - DNA, 33 bp, Homo sapiens
atgtcatgagaaaatcraatctagtgaacattt

SEQ ID NO: 574 - DNA, 33 bp, Homo sapiens
atgtggggagatggatkaatattgggactagtt

SEQ ID NO: 575 - DNA, 33 bp, Homo sapiens
atgttaatttgtttgartattgtgcacaatgtc

SEQ ID NO: 576 - DNA, 33 bp, Homo sapiens
atgttgaaacacttaaycaaatgcttaatgcct

SEQ ID NO: 577 - DNA, 33 bp, Homo sapiens
attaaaatgactttgascatacaacaggagcag

SEQ ID NO: 578 - DNA, 33 bp, Homo sapiens
attaacagggagaaaasttgcattaagaatagg

SEQ ID NO: 579 - DNA, 33 bp, Homo sapiens
attaatcccttccaaartttgcaaaaccactaa

SEQ ID NO: 580 - DNA, 33 bp, Homo sapiens
attagattgtttcaccrcggcctcgatgtaaaa

SEQ ID NO: 581 - DNA, 33 bp, Homo sapiens
attagctacaagtggayagtaaagcagggaact

SEQ ID NO: 582 - DNA, 33 bp, Homo sapiens
attagtgggtatgtggwagaattgagttatctg

SEQ ID NO: 583 - DNA, 33 bp, Homo sapiens
attatctcctgaaggaygatttagcaaattgat

SEQ ID NO: 584 - DNA, 33 bp, Homo sapiens
attatgaattcaatgcraacaacccttctctgt

SEQ ID NO: 585 - DNA, 33 bp, Homo sapiens
attatttgcccagacamtgattatacagatgaa

SEQ ID NO: 586 - DNA, 33 bp, Homo sapiens
attcactgaagtgtgayggcggggagtggagct

SEQ ID NO: 587 - DNA, 33 bp, Homo sapiens
attcatatctccattaycatcatgtaataatag

SEQ ID NO: 588 - DNA, 33 bp, Homo sapiens
attgattccagccttaygagggactctatctca

SEQ ID NO: 589 - DNA, 33 bp, Homo sapiens
caaacatctgtaacaartgctacaatcaaacat

SEQ ID NO: 590 - DNA, 33 bp, Homo sapiens
caaaggttttccgctcyatgttgtggaatgcag

SEQ ID NO: 591 - DNA, 33 bp, Homo sapiens
caagacaagtcaacaarcaatagtgctggaatc

SEQ ID NO: 592 - DNA, 33 bp, Homo sapiens
caatatgtgctgtcatraaaagatcttgaagac

SEQ ID NO: 593 - DNA, 33 bp, Homo sapiens
caatgccagagtgaacracctctaatgttctct

SEQ ID NO: 594 - DNA, 33 bp, Homo sapiens
caattaaattgttacartcacttcactgggcca

SEQ ID NO: 595 - DNA, 33 bp, Homo sapiens
cacacatgtatagacasacatacaaccttccca

SEQ ID NO: 596 - DNA, 33 bp, Homo sapiens
tcgatggcattttagckcctctgttattgtcta

SEQ ID NO: 597 - DNA, 33 bp, Homo sapiens
cacatgacccgctaacrattcttctatctttta

SEQ ID NO: 598 - DNA, 33 bp, Homo sapiens
cacattgattatagcartatttcacgaaaaatc

SEQ ID NO: 599 - DNA, 33 bp, Homo sapiens
caccaactctagttcayacctcattgttgctgc

SEQ ID NO: 600 - DNA, 33 bp, Homo sapiens
cactctggaaagtagcmaatttgtttggaaaac

SEQ ID NO: 601 - DNA, 33 bp, Homo sapiens
cacttgtgagactccaytctgtaactcaaggca

SEQ ID NO: 602 - DNA, 33 bp, Homo sapiens
cagcaaacatttttgamcacttattacgtgcca

SEQ ID NO: 603 - DNA, 33 bp, Homo sapiens
cagccaactacgatgaygaccgcaagtggggct

SEQ ID NO: 604 - DNA, 33 bp, Homo sapiens
cagcttggtattgggargctcttctgactctca

SEQ ID NO: 605 - DNA, 33 bp, Homo sapiens
caggaaatgcaggaccraaagcactcaagcctg

SEQ ID NO: 606 - DNA, 33 bp, Homo sapiens
cagtgacacctatgtgragtgctaattggggaa

SEQ ID NO: 607 - DNA, 33 bp, Homo sapiens
cagtgctaagaggaatraacactcattgtgcag

SEQ ID NO: 608 - DNA, 33 bp, Homo sapiens
cagttctggaatagagmatattgatttatgaca

SEQ ID NO: 609 - DNA, 33 bp, Homo sapiens
cataaacaacttcatakaacatcaacagcagac

SEQ ID NO: 610 - DNA, 33 bp, Homo sapiens
cataaatacttgtgcartaccctcaggacctgt

SEQ ID NO: 611 - DNA, 33 bp, Homo sapiens
catactagtttcttccyctcctttcatgactca

SEQ ID NO: 612 - DNA, 33 bp, Homo sapiens
catactctaatggcagmaccgcagctgaaacat

SEQ ID NO: 613 - DNA, 33 bp, Homo sapiens
tgagctgagctctagarggatggcttttcatct

SEQ ID NO: 614 - DNA, 33 bp, Homo sapiens
catcatttctatcctgwagaagcctgacactga

SEQ ID NO: 615 - DNA, 33 bp, Homo sapiens
catctaacacctgcctyaactaagtaggaggaa

SEQ ID NO: 616 - DNA, 33 bp, Homo sapiens
ttttggaacagcagcgragacattctgcagtga

SEQ ID NO: 617 - DNA, 33 bp, Homo sapiens
catgacttgaagaacarcgataaccaagcaaag

SEQ ID NO: 618 - DNA, 33 bp, Homo sapiens
catgagaattcaataawctgagttatgccagtg

SEQ ID NO: 619 - DNA, 33 bp, Homo sapiens
catgtgcaaaactataycaagtgagtccatatt

SEQ ID NO: 620 - DNA, 33 bp, Homo sapiens
catgtttctgtattaaygtgaaggttatgagat

SEQ ID NO: 621 - DNA, 33 bp, Homo sapiens
cattagttcacttatarcaatggcctctagctc

SEQ ID NO: 622 - DNA, 33 bp, Homo sapiens
cattgcttctgagtaartctgacaactttgatt

SEQ ID NO: 623 - DNA, 33 bp, Homo sapiens
ccaaactcggtccttcrcttgaagattttgcag

SEQ ID NO: 624 - DNA, 33 bp, Homo sapiens
ccacaagtactattccraaagagtctgaaccaa

SEQ ID NO: 625 - DNA, 33 bp, Homo sapiens
ccacacagtgagtaaayggcaaaattcagggct

SEQ ID NO: 626 - DNA, 33 bp, Homo sapiens
ccacccttcaaagttcraaaacacaaatgagtg

SEQ ID NO: 627 - DNA, 33 bp, Homo sapiens
ccacccttcatcggtcwctggcccatcgtttta

SEQ ID NO: 628 - DNA, 33 bp, Homo sapiens
ccactatgaagagtctmaaagctcctaaagact

SEQ ID NO: 629 - DNA, 33 bp, Homo sapiens
ccagtccagatcccaarctcttatctaagagaa

SEQ ID NO: 630 - DNA, 33 bp, Homo sapiens
ccatcagacgcttaccyaatagttgtggcatct

SEQ ID NO: 631 - DNA, 33 bp, Homo sapiens
ccatcagtggataatgraaatacggtgtctgta

SEQ ID NO: 632 - DNA, 33 bp, Homo sapiens
cccacacacttcaagartaggcagcactgatcc

SEQ ID NO: 633 - DNA, 33 bp, Homo sapiens
cccaccattcagggtaraagtttccacgccatc

SEQ ID NO: 634 - DNA, 33 bp, Homo sapiens
cccagaaagcgaagtayaaaacctattccagga

SEQ ID NO: 635 - DNA, 33 bp, Homo sapiens
cccagaatattgttggmagtcaattaggaaagc

SEQ ID NO: 636 - DNA, 33 bp, Homo sapiens
cccattaaatgtgataytagctctaggtttttt

SEQ ID NO: 637 - DNA, 33 bp, Homo sapiens
cccccgctactgtgcarccgccgtgacgacagg

SEQ ID NO: 638 - DNA, 33 bp, Homo sapiens
ccccctggatgtgcaakttatctgtacagcaaa

SEQ ID NO: 639 - DNA, 33 bp, Homo sapiens
cccctggcatagtagtyaaaggctgtaggagcc

SEQ ID NO: 640 - DNA, 33 bp, Homo sapiens
ccgccattttagtcaayggtcactctgtgtact

SEQ ID NO: 641 - DNA, 33 bp, Homo sapiens
cctcaaagggtcggacragaatatcttctgact

SEQ ID NO: 642 - DNA, 33 bp, Homo sapiens
cctccactaaatatgarcagccattgtgcacat

SEQ ID NO: 643 - DNA, 33 bp, Homo sapiens
cctctctcctaccttaygtttaattactcagca

SEQ ID NO: 644 - DNA, 33 bp, Homo sapiens
cctgatttgattactaygcattttagatgtgta

SEQ ID NO: 645 - DNA, 33 bp, Homo sapiens
cctgcccataataaacmcatccagaagagaccc

SEQ ID NO: 646 - DNA, 33 bp, Homo sapiens
cctgtatgatctgacaygaacagatagccacaa

SEQ ID NO: 647 - DNA, 33 bp, Homo sapiens
ccttctatattacaggmattatccatgcaatat

SEQ ID NO: 648 - DNA, 33 bp, Homo sapiens
ccttttataacatcaartatggtccagaattca

SEQ ID NO: 649 - DNA, 33 bp, Homo sapiens
cgctaaacctgacagarctctcagtgcggtctt

SEQ ID NO: 650 - DNA, 33 bp, Homo sapiens
cgctgcctttaatccakcaaaaagcttttacct

SEQ ID NO: 651 - DNA, 33 bp, Homo sapiens
cggagtgctattctaaygagtgctcctccaagt

SEQ ID NO: 652 - DNA, 33 bp, Homo sapiens
cgggattctgaagtaaycagcggcactgcaagc

SEQ ID NO: 653 - DNA, 33 bp, Homo sapiens
cggtcacagttaacttwaagagcatactgaata

SEQ ID NO: 654 - DNA, 33 bp, Homo sapiens
cgttcataaatttcacyaagtcatcaacacaaa

SEQ ID NO: 655 - DNA, 33 bp, Homo sapiens
ctaaagacagaagggcratctcaagataccgat

SEQ ID NO: 656 - DNA, 33 bp, Homo sapiens
ctaagcatcaaagcagyatcatacacgttgctt

SEQ ID NO: 657 - DNA, 33 bp, Homo sapiens
ctaatgctaaacaagawgacttcaatactggga

SEQ ID NO: 658 - DNA, 33 bp, Homo sapiens
ctaatggagatatacartaagacgaatgttgtt

SEQ ID NO: 659 - DNA, 33 bp, Homo sapiens
ctactgggcctagcacwctgtttggcaacaaat

SEQ ID NO: 660 - DNA, 33 bp, Homo sapiens
ctacttactaaagtcaygcaaggtcattgtaag

SEQ ID NO: 661 - DNA, 33 bp, Homo sapiens
ctaggaatcacatagasagaaaaaagtcaaaac

SEQ ID NO: 662 - DNA, 33 bp, Homo sapiens
ctaggcttgaatgagaraataacgatacctttc

SEQ ID NO: 663 - DNA, 33 bp, Homo sapiens
ctagtgcatcattgaasgaaaggaatttcacac

SEQ ID NO: 664 - DNA, 33 bp, Homo sapiens
ctatcttttgttgtacrcagtttgcatcacaaa

SEQ ID NO: 665 - DNA, 33 bp, Homo sapiens
ctcaccagaatttccaygtcatttaacaactcg

SEQ ID NO: 666 - DNA, 33 bp, Homo sapiens
ctcaggttttcaccaayagaagtggaattaaca

SEQ ID NO: 667 - DNA, 33 bp, Homo sapiens
ctccatcactgggtgcracactccttacagagc

SEQ ID NO: 668 - DNA, 33 bp, Homo sapiens
ctctacatgactcttgmaacttgatttactcct

SEQ ID NO: 669 - DNA, 33 bp, Homo sapiens
ctctatttaccatttcmatgaatgttgtacctt

SEQ ID NO: 670 - DNA, 33 bp, Homo sapiens
ctctgagcttgtggtcyatatattaaaaggcac

SEQ ID NO: 671 - DNA, 33 bp, Homo sapiens
ctcttatcagtggctayaatgactatgagaaaa

SEQ ID NO: 672 - DNA, 33 bp, Homo sapiens
ctgaaggaaatggaccrccctggatgcctacac

SEQ ID NO: 673 - DNA, 33 bp, Homo sapiens
ctgagcttgccttgcaraactcatgaagggtgc

SEQ ID NO: 674 - DNA, 33 bp, Homo sapiens
ctgaggctgccctcaartgattcagcagggtag

SEQ ID NO: 675 - DNA, 33 bp, Homo sapiens
ctgatatctgctccacrgacgtgtaaaatcaca

SEQ ID NO: 676 - DNA, 33 bp, Homo sapiens
ctgccagcttttgcaaytggagggaaaggtgtc

SEQ ID NO: 677 - DNA, 33 bp, Homo sapiens
ctgccccggaagttcartagaataaagatatca

SEQ ID NO: 678 - DNA, 33 bp, Homo sapiens
ctgcttggtttgacaasttaatatgacattcat

SEQ ID NO: 679 - DNA, 33 bp, Homo sapiens
ctgcttgtgagcacaaycatagtggtgaatgcc

SEQ ID NO: 680 - DNA, 33 bp, Homo sapiens
ctggaagcatggtcacragctcttcttccttct

SEQ ID NO: 681 - DNA, 33 bp, Homo sapiens
ctggacagcattccaaraagaccatgtgttctc

SEQ ID NO: 682 - DNA, 33 bp, Homo sapiens
ctggccaacctgctaartatatccagaataaga

SEQ ID NO: 683 - DNA, 33 bp, Homo sapiens
ctgtaaacttctatackactttgtaccacccat

SEQ ID NO: 684 - DNA, 33 bp, Homo sapiens
ctgtacaccataaataygtatctttcttgtttt

SEQ ID NO: 685 - DNA, 33 bp, Homo sapiens
ctgtcatcccatccacragattcactcatagat

SEQ ID NO: 686 - DNA, 33 bp, Homo sapiens
ctgtgatagtttatgayggagttgttagggtcg

SEQ ID NO: 687 - DNA, 33 bp, Homo sapiens
ggacttttatcaggaarcaataaatgcatttca

SEQ ID NO: 688 - DNA, 33 bp, Homo sapiens
ctgtttagcatacaccrattccatctgagaata

SEQ ID NO: 689 - DNA, 33 bp, Homo sapiens
ctgtttcagaggttcgratggagcgccggggct

SEQ ID NO: 690 - DNA, 33 bp, Homo sapiens
ctgttttctagagcaaygacatagggcagtgga

SEQ ID NO: 691 - DNA, 33 bp, Homo sapiens
cttaaattcaaatttawctctgctgtgtatttt

SEQ ID NO: 692 - DNA, 33 bp, Homo sapiens
cttccctaagccaaaastgtctgagaacatttt

SEQ ID NO: 693 - DNA, 33 bp, Homo sapiens
cttctttttacctatckccactagtgtcactga

SEQ ID NO: 694 - DNA, 33 bp, Homo sapiens
cttgaaatttcctctakgatagcttctctttgg

SEQ ID NO: 695 - DNA, 33 bp, Homo sapiens
cttgaactgagtaggcyaaaaatttgctttcct

SEQ ID NO: 696 - DNA, 33 bp, Homo sapiens
cttgcttttaacccaayttcttaattcagaaca

SEQ ID NO: 697 - DNA, 33 bp, Homo sapiens
cttggatatggcccaaycacagaagtaaattgt

SEQ ID NO: 698 - DNA, 33 bp, Homo sapiens
cttgtttttaaatcctraagtcatgtcagtttt

SEQ ID NO: 699 - DNA, 33 bp, Homo sapiens
ctttagaaaacagagayggtgtgcttccagcac

SEQ ID NO: 700 - DNA, 33 bp, Homo sapiens
ctttatgacatctcacwctggtccagaccaaga

SEQ ID NO: 701 - DNA, 33 bp, Homo sapiens
ctttcctcaggttaaasaagaaatcagttctga

SEQ ID NO: 702 - DNA, 33 bp, Homo sapiens
ctttcctctgtcttccycatttctgctactggg

SEQ ID NO: 703 - DNA, 33 bp, Homo sapiens
ctttgacaataatgagrcgagtagatgaggaca

SEQ ID NO: 704 - DNA, 33 bp, Homo sapiens
cttttcactatcatcaygaaattcctttgcttc

SEQ ID NO: 705 - DNA, 33 bp, Homo sapiens
cttttgcacccaagcastagaactaagtgggat

SEQ ID NO: 706 - DNA, 33 bp, Homo sapiens
cttttggaattggaacycatatcagttatctta

SEQ ID NO: 707 - DNA, 33 bp, Homo sapiens
gaaacattaccatattsaagacagtgaacaagt

SEQ ID NO: 708 - DNA, 33 bp, Homo sapiens
gaaacctgcagtgaaarcgtaaggtgatggagc

SEQ ID NO: 709 - DNA, 33 bp, Homo sapiens
gaaagatataaccaaarcctctttcttctccac

SEQ ID NO: 710 - DNA, 33 bp, Homo sapiens
gaaatgcagtttgataygagacactgaattggg

SEQ ID NO: 711 - DNA, 33 bp, Homo sapiens
gaacttcaaaattccarggtgcaaatatattgt

SEQ ID NO: 712 - DNA, 33 bp, Homo sapiens
gaataaagcctagtaarcatggcacgctagtga

SEQ ID NO: 713 - DNA, 33 bp, Homo sapiens
gaatacatataaccaayagactcatatccagaa

SEQ ID NO: 714 - DNA, 33 bp, Homo sapiens
gacacatttgctaaaaytatacaatcacagcaa

SEQ ID NO: 715 - DNA, 33 bp, Homo sapiens
gacatcaaaattatcartaacgcaaaatataag

SEQ ID NO: 716 - DNA, 33 bp, Homo sapiens
gacgaggcaggagctcratcaatgctggaacat

SEQ ID NO: 717 - DNA, 33 bp, Homo sapiens
gactcactattctatcrcattggtcaatttgtc

SEQ ID NO: 718 - DNA, 33 bp, Homo sapiens
gactcctcatcagatgraacaagtgtctctcgt

SEQ ID NO: 719 - DNA, 33 bp, Homo sapiens
gacttcaatcggcaaaratgtagggaccagcct

SEQ ID NO: 720 - DNA, 33 bp, Homo sapiens
gacttgatctaacatascatttatcacggtgaa

SEQ ID NO: 721 - DNA, 33 bp, Homo sapiens
gactttgaacattttckaatcaagcaattatgg

SEQ ID NO: 722 - DNA, 33 bp, Homo sapiens
gagaaaagccaaagaartaaatctgagttacct

SEQ ID NO: 723 - DNA, 33 bp, Homo sapiens
gagaaccagggagccartcgaagggtaggagaa

SEQ ID NO: 724 - DNA, 33 bp, Homo sapiens
gagagagttagagagayaggtcaagtccttagt

SEQ ID NO: 725 - DNA, 33 bp, Homo sapiens
gagatgtaaggacttcyaggatttagtatgagt

SEQ ID NO: 726 - DNA, 33 bp, Homo sapiens
gagcaccttttaatgcrcttatctgccatccac

SEQ ID NO: 727 - DNA, 33 bp, Homo sapiens
gagcaggaaacataaawggatgagcaggctgct

SEQ ID NO: 728 - DNA, 33 bp, Homo sapiens
gagcagtctttaaacaygggcagtgcacgcaca

SEQ ID NO: 729 - DNA, 33 bp, Homo sapiens
gagctgcagaggacagracgtgaccctaccacc

SEQ ID NO: 730 - DNA, 33 bp, Homo sapiens
gaggctctgcatccagkaatccaggcttctagt

SEQ ID NO: 731 - DNA, 33 bp, Homo sapiens
gagtaatcgcccaaaayagtgtttgccaaaatg

SEQ ID NO: 732 - DNA, 33 bp, Homo sapiens
gagtcaggctggtcaayttcaaaatactttaga

SEQ ID NO: 733 - DNA, 33 bp, Homo sapiens
gagtcttatctccccaytccgaatacaagctcc

SEQ ID NO: 734 - DNA, 33 bp, Homo sapiens
gagtgatgtggatgaawctttactccatacaat

SEQ ID NO: 735 - DNA, 33 bp, Homo sapiens
gatagcattaaagcaayggtccccttaatttcc

SEQ ID NO: 736 - DNA, 33 bp, Homo sapiens
gatcatgccattcttaygcttaaaacccttcag

SEQ ID NO: 737 - DNA, 33 bp, Homo sapiens
gatgaaagaggcaccaytggaatttacagccca

SEQ ID NO: 738 - DNA, 33 bp, Homo sapiens
gatgctgctatgaccaytcacttacaagttttg

SEQ ID NO: 739 - DNA, 33 bp, Homo sapiens
gatggagaaaaggtcarggaaccggcaaagagg

SEQ ID NO: 740 - DNA, 33 bp, Homo sapiens
gatgtatattatctcaragacttactagtttag

SEQ ID NO: 741 - DNA, 33 bp, Homo sapiens
ggaaaaggcagggttayagctgatgagtttgat

SEQ ID NO: 742 - DNA, 33 bp, Homo sapiens
gattttattctaagcaygatgggaaaccactgg

SEQ ID NO: 743 - DNA, 33 bp, Homo sapiens
gattttctgccaagacrataagaagagtacttt

SEQ ID NO: 744 - DNA, 33 bp, Homo sapiens
gcaaaaaaaggtaactsaggacttagtgaagtg

SEQ ID NO: 745 - DNA, 33 bp, Homo sapiens
gcaattcgtaaataaarcaagtgaaaatggaga

SEQ ID NO: 746 - DNA, 33 bp, Homo sapiens
gcacagagtaggccagraccgatggtgatacca

SEQ ID NO: 747 - DNA, 33 bp, Homo sapiens
gcaccctctgaaataaytctgcaaaccactggg

SEQ ID NO: 748 - DNA, 33 bp, Homo sapiens
gcacctcctctgtccargatatgatgccaagta

SEQ ID NO: 749 - DNA, 33 bp, Homo sapiens
gcactgtagtccaataytaattgtcactattaa

SEQ ID NO: 750 - DNA, 33 bp, Homo sapiens
gcagctttgtgcactcrctgtctttgcaaagtg

SEQ ID NO: 751 - DNA, 33 bp, Homo sapiens
gcaggactcactgcagraaatggaaaaggtgcc

SEQ ID NO: 752 - DNA, 33 bp, Homo sapiens
gcagggagacttgtcarggaagggcatccgagg

SEQ ID NO: 753 - DNA, 33 bp, Homo sapiens
gcatagatagatggtarctatggaaacaatatg

SEQ ID NO: 754 - DNA, 33 bp, Homo sapiens
gcatggccttggggtawtacactatgcctaaag

SEQ ID NO: 755 - DNA, 33 bp, Homo sapiens
gcatgtttctaaaaacrcttcaggaatccagag

SEQ ID NO: 756 - DNA, 33 bp, Homo sapiens
gccaacttgcttgagtracactgatgaaaaaag

SEQ ID NO: 757 - DNA, 33 bp, Homo sapiens
gccagaccaatgttgayctttaaattaccccag

SEQ ID NO: 758 - DNA, 33 bp, Homo sapiens
gccaggaagagttagcragtagaatactataat

SEQ ID NO: 759 - DNA, 33 bp, Homo sapiens
gcctagtgcaaggaggratgctattcaaaaata

SEQ ID NO: 760 - DNA, 33 bp, Homo sapiens
gcctctttcaaaactasctttctatgaagtgaa

SEQ ID NO: 761 - DNA, 33 bp, Homo sapiens
gcctttggtctccatcsctaacaaataaattta

SEQ ID NO: 762 - DNA, 33 bp, Homo sapiens
gcgttagaattagagasgagcctgtgacgcttg

SEQ ID NO: 763 - DNA, 33 bp, Homo sapiens
gctatcgatatttccarggggatttcatttatt

SEQ ID NO: 764 - DNA, 33 bp, Homo sapiens
gctatctttccatgacygaaatactcatgcctg

SEQ ID NO: 765 - DNA, 33 bp, Homo sapiens
gctccctacagtctccrgcatcagtctgttctc

SEQ ID NO: 766 - DNA, 33 bp, Homo sapiens
gctctccaatcctctarcttagtctgcctgttg

SEQ ID NO: 767 - DNA, 33 bp, Homo sapiens
gctcttatttgctctayaatgcatacaggtata

SEQ ID NO: 768 - DNA, 33 bp, Homo sapiens
gctgtgttagtttagayactgcctaagtaggtt

SEQ ID NO: 769 - DNA, 33 bp, Homo sapiens
gcttccttattagatckcattgcctctcccggg

SEQ ID NO: 770 - DNA, 33 bp, Homo sapiens
gcttctcatgctcctasctatggccttcctatc

SEQ ID NO: 771 - DNA, 33 bp, Homo sapiens
gcttctgcatattaatyagttgagcatttacag

SEQ ID NO: 772 - DNA, 33 bp, Homo sapiens
gctttaaaccatgaccmaaatttaaggtctaga

SEQ ID NO: 773 - DNA, 33 bp, Homo sapiens
ggaaaactcaggggagkaaacagctttgaagat

SEQ ID NO: 774 - DNA, 33 bp, Homo sapiens
ggaaagggactgcatayggcttcataggttggg

SEQ ID NO: 775 - DNA, 33 bp, Homo sapiens
ggaagaagagtgatgaygttatgaagtaaacaa

SEQ ID NO: 776 - DNA, 33 bp, Homo sapiens
ggaagggaggtaatacrgatcaattacagatgt

SEQ ID NO: 777 - DNA, 33 bp, Homo sapiens
ggaatttagctaaggamacatatgaacctctga

SEQ ID NO: 778 - DNA, 33 bp, Homo sapiens
ggacttttgaaacagamaacaaggctgaatctc

SEQ ID NO: 779 - DNA, 33 bp, Homo sapiens
ggagagcactcaggtarcaacacaatagatctg

SEQ ID NO: 780 - DNA, 33 bp, Homo sapiens
ggaggtgagctcacccragataaacggctggac

SEQ ID NO: 781 - DNA, 33 bp, Homo sapiens
tatagattacaagagaraggctgactacaaagt

SEQ ID NO: 782 - DNA, 33 bp, Homo sapiens
tcaccatagaattatasaagtcagattttctgc

SEQ ID NO: 783 - DNA, 33 bp, Homo sapiens
gaaagctttatctacckggaacattagcatttc

SEQ ID NO: 784 - DNA, 33 bp, Homo sapiens
ggatttatcctacaaasgcatataaatgggaaa

SEQ ID NO: 785 - DNA, 33 bp, Homo sapiens
gtagattgagggaaacrcgaatattttagacca

SEQ ID NO: 786 - DNA, 33 bp, Homo sapiens
gtctattttcatactarcaccgtgctgttttgg

SEQ ID NO: 787 - DNA, 33 bp, Homo sapiens
gttgtcttagaagccaygggaagcaaacgtatg

SEQ ID NO: 788 - DNA, 33 bp, Homo sapiens
taaccaaagagagctamaaaattaatgaaattc

SEQ ID NO: 789 - DNA, 33 bp, Homo sapiens
tacttttacctaaacartaaacattagctatga

SEQ ID NO: 790 - DNA, 33 bp, Homo sapiens
tagatatctcgctctcyacttaaggaaagaaca

SEQ ID NO: 791 - DNA, 33 bp, Homo sapiens
tatcatagcacttatasagtgttgtgccattgt

SEQ ID NO: 792 - DNA, 33 bp, Homo sapiens
tatttaaaaatcaaccsataagtctttcacatc

SEQ ID NO: 793 - DNA, 33 bp, Homo sapiens
tcaagaaacagccaaasagtgtacctgcagtgg

SEQ ID NO: 794 - DNA, 33 bp, Homo sapiens
tcactcactctccacayataactggtaaatggt

SEQ ID NO: 795 - DNA, 33 bp, Homo sapiens
agaagctgagctctacsgcgggataagatcagc

SEQ ID NO: 796 - DNA, 33 bp, Homo sapiens
tcctaaaagttccagaraaactgttgctcttga

SEQ ID NO: 797 - DNA, 33 bp, Homo sapiens
tcttattatgacattcycacaaaaactgcaagg

SEQ ID NO: 798 - DNA, 33 bp, Homo sapiens
tgaatcctggtccttcmatctggcgtcatttta

SEQ ID NO: 799 - DNA, 33 bp, Homo sapiens
tgctggatttgaagagraaatgagaaccaggaa

SEQ ID NO: 800 - DNA, 33 bp, Homo sapiens
tggcaatcacagaagartccttctcagactggt

SEQ ID NO: 801 - DNA, 33 bp, Homo sapiens
tgggaattaccagacamctttgggtatgttctc

SEQ ID NO: 802 - DNA, 33 bp, Homo sapiens
tgggagcaaaactcccygatacattctaaatat

SEQ ID NO: 803 - DNA, 33 bp, Homo sapiens
tgtctctctaagccackagaactcccactaaga

SEQ ID NO: 804 - DNA, 33 bp, Homo sapiens
ttaattctgaccattcrcccttgttcttcgtac

SEQ ID NO: 805 - DNA, 33 bp, Homo sapiens
ttacaagtggtactgtwaaaacaagtgcagcaa

SEQ ID NO: 806 - DNA, 33 bp, Homo sapiens
ttacctgtggtgtagcrattaatagcaaggaat

SEQ ID NO: 807 - DNA, 33 bp, Homo sapiens
ctcttctatctcctaastattgacagagaactt

SEQ ID NO: 808 - DNA, 33 bp, Homo sapiens
ttatagcgatacaccayaataaatatgtagcta

SEQ ID NO: 809 - DNA, 33 bp, Homo sapiens
ttctacaatcaaaatcrgacaggtaaatagatt

SEQ ID NO: 810 - DNA, 33 bp, Homo sapiens
caggcaaatgtccaaaygagcattaggtgtacg

SEQ ID NO: 811 - DNA, 33 bp, Homo sapiens
ttgcagtgactatcaaygtgagtccaaattccc

SEQ ID NO: 812 - DNA, 33 bp, Homo sapiens
ttgttggtgacattgakatggtcgagctagtct

SEQ ID NO: 813 - DNA, 33 bp, Homo sapiens
ttttaggacattttcaycaactcaaaaataaac

SEQ ID NO: 814 - DNA, 33 bp, Homo sapiens
acttgctgttcttgaamacctcaaactgtgtat

SEQ ID NO: 815 - DNA, 33 bp, Homo sapiens
aagggtgtgtaatagamtcctactccaacagga

SEQ ID NO: 816 - DNA, 33 bp, Homo sapiens
tgggttttacagatagraaaatttaggtacata

SEQ ID NO: 817 - DNA, 33 bp, Homo sapiens
ttggatgaaaacattasactctatggatgaggg

SEQ ID NO: 818 - DNA, 33 bp, Homo sapiens
taaattataaagcaaasttatagccaattctca

SEQ ID NO: 819 - DNA, 33 bp, Homo sapiens
aattttcctacagaccratcaggaaggactcca

SEQ ID NO: 820 - DNA, 33 bp, Homo sapiens
cagagcaaaagcatatkatagcaaagcatatag

SEQ ID NO: 821 - DNA, 33 bp, Homo sapiens
agatgcgtttgctctakgatgatcctgagatgg

SEQ ID NO: 822 - DNA, 33 bp, Homo sapiens
tactgagcttagaatgyagatcactccaatcat

SEQ ID NO: 823 - DNA, 33 bp, Homo sapiens
attatttttatgtcacrgaagccaatttctatt

SEQ ID NO: 824 - DNA, 33 bp, Homo sapiens
ttattcccttattccastaatgcaaggcttaat

SEQ ID NO: 825 - DNA, 33 bp, Homo sapiens
cagtttaaaagatgtgyatttgaacatttctat

SEQ ID NO: 826 - DNA, 33 bp, Homo sapiens
gcagagcctcacaggaygtaaagatcagagaaa

SEQ ID NO: 827 - DNA, 33 bp, Homo sapiens
ggtaatatgtgtgaaaytgagccctgcatttta

SEQ ID NO: 828 - DNA, 33 bp, Homo sapiens
aggttttcaacacctcrcgcctcagtgcctgtg

SEQ ID NO: 829 - DNA, 33 bp, Homo sapiens
gatatgagaagagatcractcatttacatcttg

SEQ ID NO: 830 - DNA, 33 bp, Homo sapiens
aataactctcaaaaaayatggtttctctctttc

SEQ ID NO: 831 - DNA, 33 bp, Homo sapiens
cccaaagcaaagcaaaygtaggacatgagagtc

SEQ ID NO: 832 - DNA, 33 bp, Homo sapiens
cttatccctggggaaakgacagcgattagtact

SEQ ID NO: 833 - DNA, 33 bp, Homo sapiens
tacctacactatgccayctctttcctatttgtg

SEQ ID NO: 834 - DNA, 33 bp, Homo sapiens
aaagcagacattgccarctggttatctcttttc

SEQ ID NO: 835 - DNA, 33 bp, Homo sapiens
cattttgagaaccactraagtaaaactcatcta

SEQ ID NO: 836 - DNA, 33 bp, Homo sapiens
tcggtatgtgagcaaaygttaaatgacatagtg

SEQ ID NO: 837 - DNA, 33 bp, Homo sapiens
aaaacaacaataaaaamctcttcaaatcctaat

SEQ ID NO: 838 - DNA, 33 bp, Homo sapiens
aaaataaaaggaatcaratttatccagtaggat

SEQ ID NO: 839 - DNA, 33 bp, Homo sapiens
aaagaggagtactcaargttgtatatgtgtaac

SEQ ID NO: 840 - DNA, 33 bp, Homo sapiens
aactaggaaaccatcartatgtgacaaaataca

SEQ ID NO: 841 - DNA, 33 bp, Homo sapiens
aactctggtgttgaccyagcgggtagcatgaga

SEQ ID NO: 842 - DNA, 33 bp, Homo sapiens
aagacctagccccaaasagtttatagtctagag

SEQ ID NO: 843 - DNA, 33 bp, Homo sapiens
acgatcaggttacaaaygcaatacattagggac

SEQ ID NO: 844 - DNA, 33 bp, Homo sapiens
aaggtcctgtctggccyagagtatctattatgc

SEQ ID NO: 845 - DNA, 33 bp, Homo sapiens
aaggttaagatgctcartgaataataaatggtc

SEQ ID NO: 846 - DNA, 33 bp, Homo sapiens
aagctgagatctttgamaaaaggttacaggaac

SEQ ID NO: 847 - DNA, 33 bp, Homo sapiens
accttttctaacatcawgtgtcattgacacctt

SEQ ID NO: 848 - DNA, 33 bp, Homo sapiens
actctggaataccaaamtacagtcatggcagtc

SEQ ID NO: 849 - DNA, 33 bp, Homo sapiens
cttaaaggttattacastcagcttcaaaatgat

SEQ ID NO: 850 - DNA, 33 bp, Homo sapiens
agaaaccatacagagaytccagatgtttgaatt

SEQ ID NO: 851 - DNA, 33 bp, Homo sapiens
agagctaaaaacagaaycattcgacccaacaat

SEQ ID NO: 852 - DNA, 33 bp, Homo sapiens
agagcttcgatttaatragaacaaacatgatat

SEQ ID NO: 853 - DNA, 33 bp, Homo sapiens
agatacaaaccagattsaaaggatctttaatat

SEQ ID NO: 854 - DNA, 33 bp, Homo sapiens
agccatgatatgacacrggttacaatagattaa

SEQ ID NO: 855 - DNA, 33 bp, Homo sapiens
tctgaggatatctgctyacatatattcctcatt

SEQ ID NO: 856 - DNA, 33 bp, Homo sapiens
agtataatctgtcatgraagctcgacagaaaga

SEQ ID NO: 857 - DNA, 33 bp, Homo sapiens
agtcagtatatgtaaartgaacattgttttggt

SEQ ID NO: 858 - DNA, 33 bp, Homo sapiens
agtggaaaaacagtaayacagaacatagacggt

SEQ ID NO: 859 - DNA, 33 bp, Homo sapiens
ataactaactataaaamccagcatctaacataa

SEQ ID NO: 860 - DNA, 33 bp, Homo sapiens
ataatagatgtaacaawggcgatgatgtaatat

SEQ ID NO: 861 - DNA, 33 bp, Homo sapiens
atctataaggacattargccagaaataatcttt

SEQ ID NO: 862 - DNA, 33 bp, Homo sapiens
caaatcagggcaaaaaktcaacagcttctgccc

SEQ ID NO: 863 - DNA, 33 bp, Homo sapiens
caattgttgcagcaaayttcattatcatcttct

SEQ ID NO: 864 - DNA, 33 bp, Homo sapiens
aaatctctaaactctamattcctgtgcttaaga

SEQ ID NO: 865 - DNA, 33 bp, Homo sapiens
cacattctgtaaaataracattcaagcctcatt

SEQ ID NO: 866 - DNA, 33 bp, Homo sapiens
catacaaaacgacataygttggcatttgctttt

SEQ ID NO: 867 - DNA, 33 bp, Homo sapiens
catgttatcttcgtagraaagcaaggggagttc

SEQ ID NO: 868 - DNA, 33 bp, Homo sapiens
cattttgtttcattaayccaagacttaatttgg

SEQ ID NO: 869 - DNA, 33 bp, Homo sapiens
ccactaatagatagcartaacatcaaatgtcaa

SEQ ID NO: 870 - DNA, 33 bp, Homo sapiens
ccattgtaaggactcamaatctatacaggagga

SEQ ID NO: 871 - DNA, 33 bp, Homo sapiens
cctagacgattgcatarcttaaaaaggggcatg

SEQ ID NO: 872 - DNA, 33 bp, Homo sapiens
cctgaaagccataaaayaactgctaagtttttc

SEQ ID NO: 873 - DNA, 33 bp, Homo sapiens
ctatgtaatcaagttawcctctgcagcttgctt

SEQ ID NO: 874 - DNA, 33 bp, Homo sapiens
ctatttgaaggtgagaraggagtggacaatata

SEQ ID NO: 875 - DNA, 33 bp, Homo sapiens
aacttcctcaattttgraggctcaagacttctc

SEQ ID NO: 876 - DNA, 33 bp, Homo sapiens
ctgaagtcacccagccracaggaagtcctacat

SEQ ID NO: 877 - DNA, 33 bp, Homo sapiens
ctgtggaaaaatctgartacagcctgatatttg

SEQ ID NO: 878 - DNA, 33 bp, Homo sapiens
cttcaccactttgttawatggcccctcggttta

SEQ ID NO: 879 - DNA, 33 bp, Homo sapiens
cttctttcaggatggaraaggcactagaagaag

SEQ ID NO: 880 - DNA, 33 bp, Homo sapiens
cttgcagaccattttarggaacacttggatgga

SEQ ID NO: 881 - DNA, 33 bp, Homo sapiens
ctttcaatatttatgaygttgtatgtgtgtctg

SEQ ID NO: 882 - DNA, 33 bp, Homo sapiens
gaagtgttagtgatgayggacagaaatagacaa

SEQ ID NO: 883 - DNA, 33 bp, Homo sapiens
gaatacataagtaataragactatgagaggaca

SEQ ID NO: 884 - DNA, 33 bp, Homo sapiens
gagacgtagagtcagckcctggtgtctacccca

SEQ ID NO: 885 - DNA, 33 bp, Homo sapiens
gatcagttttataaaargataagtggcttttca

SEQ ID NO: 886 - DNA, 33 bp, Homo sapiens
gatgatattttgaccarggtttgattgaatctg

SEQ ID NO: 887 - DNA, 33 bp, Homo sapiens
agctcgatccaggttaygaaggtgtttcccaag

SEQ ID NO: 888 - DNA, 33 bp, Homo sapiens
gattaaagggcacatamaaatgtcactggacag

SEQ ID NO: 889 - DNA, 33 bp, Homo sapiens
aatagtcatagcagaartaatactgataatatt

SEQ ID NO: 890 - DNA, 33 bp, Homo sapiens
gcaatagctcaaaaaawtttttaacactatgac

SEQ ID NO: 891 - DNA, 33 bp, Homo sapiens
gcccacataaaatgacraacttaatctgtaaat

SEQ ID NO: 892 - DNA, 33 bp, Homo sapiens
gctctaattaaaagacrcctaagtcagaggtct

SEQ ID NO: 893 - DNA, 33 bp, Homo sapiens
ggagcccatggaaggaygccaaagggcgcagca

SEQ ID NO: 894 - DNA, 33 bp, Homo sapiens
ggatacctcatagtgtraaaaaatgtgaaaata

SEQ ID NO: 895 - DNA, 33 bp, Homo sapiens
ggatggctccaagagaygtctgacttaagcaac

SEQ ID NO: 896 - DNA, 33 bp, Homo sapiens
ggcacacacctacctayagacatacagtttcag

SEQ ID NO: 897 - DNA, 33 bp, Homo sapiens
ggctcctcgttgaagtyacctcaagcagcctga

SEQ ID NO: 898 - DNA, 33 bp, Homo sapiens
gtagctcagatagatgkagacctgaataaattt

SEQ ID NO: 899 - DNA, 33 bp, Homo sapiens
tgccaaattgaatgatrtattttcacatcctga

SEQ ID NO: 900 - DNA, 33 bp, Homo sapiens
gttcaaggtctcttaamcatccttacttcactt

SEQ ID NO: 901 - DNA, 33 bp, Homo sapiens
gtttcaaccaccaatamccttgttgttgtgacc

SEQ ID NO: 902 - DNA, 33 bp, Homo sapiens
ggcaacatgctagaaaygatatgataggcaaaa

SEQ ID NO: 903 - DNA, 33 bp, Homo sapiens
taacttggcttcatcaragttttttgttttgtt

SEQ ID NO: 904 - DNA, 33 bp, Homo sapiens
tacaagtctaccaaacygggagtgaagaaagga

SEQ ID NO: 905 - DNA, 33 bp, Homo sapiens
tacactgaaattttagkccatgttcacttatta

SEQ ID NO: 906 - DNA, 33 bp, Homo sapiens
tagccacatgatcataraaaaatctctctctca

SEQ ID NO: 907 - DNA, 33 bp, Homo sapiens
taggaaaatggtggtamaatcaatatttagagg

SEQ ID NO: 908 - DNA, 33 bp, Homo sapiens
tagtgaaaacccagatmacagggaaattggctt

SEQ ID NO: 909 - DNA, 33 bp, Homo sapiens
tcctggacacataggamtaaaacaaaggataaa

SEQ ID NO: 910 - DNA, 33 bp, Homo sapiens
tctcaaggaactgagtwaaaggaaactgggggg

SEQ ID NO: 911 - DNA, 33 bp, Homo sapiens
tctctatataacaaagrctcatttggctggtga

SEQ ID NO: 912 - DNA, 33 bp, Homo sapiens
tcttccacttggtcatkaaacagccacagttct

SEQ ID NO: 913 - DNA, 33 bp, Homo sapiens
tcttctggcttttctayggttgccattttattc

SEQ ID NO: 914 - DNA, 33 bp, Homo sapiens
tggatgactgaatggcrgacagcaacttctacc

SEQ ID NO: 915 - DNA, 33 bp, Homo sapiens
tggcagccagtgatctyacctagatgaggtctg

SEQ ID NO: 916 - DNA, 33 bp, Homo sapiens
tgggatgaaagcatggkcatctccacttagaaa

SEQ ID NO: 917 - DNA, 33 bp, Homo sapiens
tgtagctatctgtaaarcagctttgtaggcctc

SEQ ID NO: 918 - DNA, 33 bp, Homo sapiens
tgtgtacaatgtttaayaagagagaaagtttta

SEQ ID NO: 919 - DNA, 33 bp, Homo sapiens
ttaaagaatttgctgawtaatctcatattcata

SEQ ID NO: 920 - DNA, 33 bp, Homo sapiens
ttaatgtactaaccacyggggaagtgcaaatta

SEQ ID NO: 921 - DNA, 33 bp, Homo sapiens
ttctttcttcagagaarcttttcctgacatcta

SEQ ID NO: 922 - DNA, 33 bp, Homo sapiens
ttgtgatcattaactamtagcatgtcctaaatg

SEQ ID NO: 923 - DNA, 33 bp, Homo sapiens
tttattacatcggaaakgttcatttgtccacac

SEQ ID NO: 924 - DNA, 33 bp, Homo sapiens
ttttaagtaggaagaartagagactctggaaag

SEQ ID NO: 925 - DNA, 33 bp, Homo sapiens
ttttaagtgaaagatgraatatcccaaatgtat

SEQ ID NO: 926 - DNA, 33 bp, Homo sapiens
ttttccaaaagctttcmaaaatctgacattgat

SEQ ID NO: 927 - DNA, 33 bp, Homo sapiens
atgaggctggttctgaragtgctaaaataagtt

SEQ ID NO: 928 - DNA, 33 bp, Homo sapiens
caccacttgcatttgakgggtatgtaacaaatt

SEQ ID NO: 929 - DNA, 33 bp, Homo sapiens
tgctgttcaaaccagamaccttgaagtccataa

SEQ ID NO: 930 - DNA, 33 bp, Homo sapiens
gctgacccacaagaacrcagggaatgaaaggca

SEQ ID NO: 931 - DNA, 33 bp, Homo sapiens
tatatttaatgaatcakgttgaaaattccctat

SEQ ID NO: 932 - DNA, 33 bp, Homo sapiens
agctggactgaaggatratatttgagacacaag

SEQ ID NO: 933 - DNA, 33 bp, Homo sapiens
catatcggccagatttratccaaataaactgaa

SEQ ID NO: 934 - DNA, 33 bp, Homo sapiens
aactacagtatcattckcatctcttacttgagg

SEQ ID NO: 935 - DNA, 33 bp, Homo sapiens
ctggcagggaaaccctraaatactgccaaagct

SEQ ID NO: 936 - DNA, 33 bp, Homo sapiens
tcagaaaatgctgcaarttcctggcactgcctg

SEQ ID NO: 937 - DNA, 33 bp, Homo sapiens
aaaataagatgacaaayaaatcagaatgacagt

SEQ ID NO: 938 - DNA, 33 bp, Homo sapiens
tcctgaaagctgaaagyaatccctatggcctgt

SEQ ID NO: 939 - DNA, 33 bp, Homo sapiens
cagcccagaggaagacrctgaagtccaaagagg

SEQ ID NO: 940 - DNA, 33 bp, Homo sapiens
atatgagtggatgacawatagtggtgtccggag

SEQ ID NO: 941 - DNA, 33 bp, Homo sapiens
aaactcctagtgcagcratgtccagccgaatgt

SEQ ID NO: 942 - DNA, 33 bp, Homo sapiens
aaataacagatctaaartgtggattgatttaag

SEQ ID NO: 943 - DNA, 33 bp, Homo sapiens
aaatcaaagcaaaggargactcaagataacaaa

SEQ ID NO: 944 - DNA, 33 bp, Homo sapiens
aaccttgcgaaatgtcyaatttatcaaaataat

SEQ ID NO: 945 - DNA, 33 bp, Homo sapiens
aagatataacgtagaayaattgatttgagcttt

SEQ ID NO: 946 - DNA, 33 bp, Homo sapiens
aataaaagtatgacagrcaaggaaaaaggcata

SEQ ID NO: 947 - DNA, 33 bp, Homo sapiens
atttgcacaaagcccartcagctggtaaaatgt

SEQ ID NO: 948 - DNA, 33 bp, Homo sapiens
acactctccctgagaarcagaacctttgatgac

SEQ ID NO: 949 - DNA, 33 bp, Homo sapiens
acactggagttattccygctacaaaggttaacc

SEQ ID NO: 950 - DNA, 33 bp, Homo sapiens
acataaagcacttagartagtccctggcatgtg

SEQ ID NO: 951 - DNA, 33 bp, Homo sapiens
accagtacgtgctgctyactgagcccagctcct

SEQ ID NO: 952 - DNA, 33 bp, Homo sapiens
acttttggaattcatayagttagacagttagga

SEQ ID NO: 953 - DNA, 33 bp, Homo sapiens
agaccattatatgcacyctgtatgcctctgcat

SEQ ID NO: 954 - DNA, 33 bp, Homo sapiens
agcctggatatgaccasatccgagttctagagc

SEQ ID NO: 955 - DNA, 33 bp, Homo sapiens
agggccgaaagagtagmcgagggctggtggtct

SEQ ID NO: 956 - DNA, 33 bp, Homo sapiens
agtagggatccaaaggkcagaaccactcctcac

SEQ ID NO: 957 - DNA, 33 bp, Homo sapiens
agtcaaacgcgcatggycagtcagttctggagg

SEQ ID NO: 958 - DNA, 33 bp, Homo sapiens
agtctgtccctaaagcrcagagttgaacaagga

SEQ ID NO: 959 - DNA, 33 bp, Homo sapiens
agtctgtgttctttaakgtcttgttttcaaata

SEQ ID NO: 960 - DNA, 33 bp, Homo sapiens
atactgctaatcttcarcgatgggaatggggaa

SEQ ID NO: 961 - DNA, 33 bp, Homo sapiens
atagggagaatgctcaytaatggtgaacatctc

SEQ ID NO: 962 - DNA, 33 bp, Homo sapiens
atcattttctctcttcrcagtcgcttggtttgg

SEQ ID NO: 963 - DNA, 33 bp, Homo sapiens
attcaagttgaaagtaycctacagaacatctaa

SEQ ID NO: 964 - DNA, 33 bp, Homo sapiens
caaattcaggctgctamatatagatgcgacaat

SEQ ID NO: 965 - DNA, 33 bp, Homo sapiens
caactctttaccaaaaraagtgaacataccaaa

SEQ ID NO: 966 - DNA, 33 bp, Homo sapiens
cacacaacaatttagayggatctcaaggggatt

SEQ ID NO: 967 - DNA, 33 bp, Homo sapiens
cacatgtgggtcgtcarctgccatcaggagtag

SEQ ID NO: 968 - DNA, 33 bp, Homo sapiens
cagttgcctgctgaccratggaagaatgtgaca

SEQ ID NO: 969 - DNA, 33 bp, Homo sapiens
catgtccaaatgactayctacagttcaaactgc

SEQ ID NO: 970 - DNA, 33 bp, Homo sapiens
ccagggagggttcatastaggagtcatccttct

SEQ ID NO: 971 - DNA, 33 bp, Homo sapiens
taaaaacttggttcaargcagggtgaaataatg

SEQ ID NO: 972 - DNA, 33 bp, Homo sapiens
cctgctgtggtctaagrctatttcccagggctc

SEQ ID NO: 973 - DNA, 33 bp, Homo sapiens
cctggctgcttagacamtcctcctgttgtttcc

SEQ ID NO: 974 - DNA, 33 bp, Homo sapiens
ccttctcagagtgtaargactagcatttatgct

SEQ ID NO: 975 - DNA, 33 bp, Homo sapiens
ccttgaaaattcattcycttagtgacaatttta

SEQ ID NO: 976 - DNA, 33 bp, Homo sapiens
ccttgctgctcaggaayaatcattggaactcca

SEQ ID NO: 977 - DNA, 33 bp, Homo sapiens
ctaactaagcccttcartatttgtccactctct

SEQ ID NO: 978 - DNA, 33 bp, Homo sapiens
ctaaggcttagttggartaagaataagaaggaa

SEQ ID NO: 979 - DNA, 33 bp, Homo sapiens
ataaaatcaaaggattsttgtcttcattattat

SEQ ID NO: 980 - DNA, 33 bp, Homo sapiens
ctgtgagtgggaaccakgtctaaacccaccagt

SEQ ID NO: 981 - DNA, 33 bp, Homo sapiens
cttcacgtgtctctacrctactctacgacattt

SEQ ID NO: 982 - DNA, 33 bp, Homo sapiens
tcgctttggaatgttayatagactgcatttgca

SEQ ID NO: 983 - DNA, 33 bp, Homo sapiens
gaataccagttcctccrgacttttgaatgctgt

SEQ ID NO: 984 - DNA, 33 bp, Homo sapiens
gaatgtcagccaagagrcccacggaatggcagg

SEQ ID NO: 985 - DNA, 33 bp, Homo sapiens
gacatgagaagacgagsaaaagacagggtttgg

SEQ ID NO: 986 - DNA, 33 bp, Homo sapiens
gaccagtgactctcacraaaagcagcctttgtt

SEQ ID NO: 987 - DNA, 33 bp, Homo sapiens
gaccatgtctcaggccyacaaaacagcttggca

SEQ ID NO: 988 - DNA, 33 bp, Homo sapiens
ggtcttgctctgaataygatcctgcaaggaggc

SEQ ID NO: 989 - DNA, 33 bp, Homo sapiens
gataattttgtcagtaycctttttgtatatgtg

SEQ ID NO: 990 - DNA, 33 bp, Homo sapiens
gatgtattctaacttcratgatactttattgat

SEQ ID NO: 991 - DNA, 33 bp, Homo sapiens
gcaagcatttaatatarcagtgtgcattaggtg

SEQ ID NO: 992 - DNA, 33 bp, Homo sapiens
gcgagttgtatagttgsacgagttgtatagttg

SEQ ID NO: 993 - DNA, 33 bp, Homo sapiens
ggaagtttagctgtaayaaagtggatttcaact

SEQ ID NO: 994 - DNA, 33 bp, Homo sapiens
ggagaagacgaatgtcscaactcaagtagtcag

SEQ ID NO: 995 - DNA, 33 bp, Homo sapiens
taaatgaaatgttgtaygcattgttgtttttta

SEQ ID NO: 996 - DNA, 33 bp, Homo sapiens
tgggtgaggagtataakgatccctaggaagata

SEQ ID NO: 997 - DNA, 33 bp, Homo sapiens
tggtttctactctgaaygctcctgaacagccct

SEQ ID NO: 998 - DNA, 33 bp, Homo sapiens
aatgtaggtccataaamtgtttgcattgatcca

SEQ ID NO: 999 - DNA, 33 bp, Homo sapiens
aattctcctcaagtgaycatttacgctttagaa

SEQ ID NO: 1000 - DNA, 33 bp, Homo sapiens
aattttcctaactgatragactctccttgaagt

SEQ ID NO: 1001 - DNA, 33 bp, Homo sapiens
atgtactagatagaacractgtccttcaacttt

SEQ ID NO: 1002 - DNA, 33 bp, Homo sapiens
ctgtgtttctttaaaakattgacagtagtcagg

SEQ ID NO: 1003 - DNA, 33 bp, Homo sapiens
gattcacaatctacaasaccagcccagcctatc

SEQ ID NO: 1004 - DNA, 33 bp, Homo sapiens
ggatgtacaatgtagaygatgccctccctgtct

SEQ ID NO: 1005 - DNA, 33 bp, Homo sapiens
ggcaaaaatcaagtcartctgctaatttaaatt

SEQ ID NO: 1006 - DNA, 33 bp, Homo sapiens
ggcaagtaagaagcgaraggctgagaagcaaga

SEQ ID NO: 1007 - DNA, 33 bp, Homo sapiens
ggcaccccctgctcccrattgctctgaggggaa

SEQ ID NO: 1008 - DNA, 33 bp, Homo sapiens
ggcactcataagcctamatgaaaaattatgtct

SEQ ID NO: 1009 - DNA, 33 bp, Homo sapiens
ggcagacatttaattgsacagctttggtcagat

SEQ ID NO: 1010 - DNA, 33 bp, Homo sapiens
ggcccattgagctccaygctccgtttgtccaca

SEQ ID NO: 1011 - DNA, 33 bp, Homo sapiens
ggctgttagtacccaakggcaacaacatgaatg

SEQ ID NO: 1012 - DNA, 33 bp, Homo sapiens
gggaaatgccaggagargccgtgttctggggta

SEQ ID NO: 1013 - DNA, 33 bp, Homo sapiens
gggacactattaaatcrcaatgtcacaggaggg

SEQ ID NO: 1014 - DNA, 33 bp, Homo sapiens
gggagagctagacaagrcctctatttttgctta

SEQ ID NO: 1015 - DNA, 33 bp, Homo sapiens
gggagtagatacggcaytattctgttgagaaat

SEQ ID NO: 1016 - DNA, 33 bp, Homo sapiens
gggatacagctcacaartctattctttaaacaa

SEQ ID NO: 1017 - DNA, 33 bp, Homo sapiens
gggctaaaacgatggasagaaatatatcatatt

SEQ ID NO: 1018 - DNA, 33 bp, Homo sapiens
gggtcagcgacacagayggacttccgtggctac

SEQ ID NO: 1019 - DNA, 33 bp, Homo sapiens
gggtggtatattgccargcagagaggagcaaag

SEQ ID NO: 1020 - DNA, 33 bp, Homo sapiens
gggtggtttctagatasagaatgagattatttc

SEQ ID NO: 1021 - DNA, 33 bp, Homo sapiens
gggtttgctctcagtartaaccatcccaggctg

SEQ ID NO: 1022 - DNA, 33 bp, Homo sapiens
ggtaatttgctcaaggyagttagtagcagagcc

SEQ ID NO: 1023 - DNA, 33 bp, Homo sapiens
ggtacctgaggcctcastaaatgctgaaaattt

SEQ ID NO: 1024 - DNA, 33 bp, Homo sapiens
ggtatgaacgaggagawtcataactgctattct

SEQ ID NO: 1025 - DNA, 33 bp, Homo sapiens
ggtgagtcttaaaggawctggttgcccaggaag

SEQ ID NO: 1026 - DNA, 33 bp, Homo sapiens
ggtggtccaggttcaasttcctcattgcaatac

SEQ ID NO: 1027 - DNA, 33 bp, Homo sapiens
ggtgtcaccattgctcyatgattaatccagcaa

SEQ ID NO: 1028 - DNA, 33 bp, Homo sapiens
ggtgttaaaatgtcacrggtttcaagatacggg

SEQ ID NO: 1029 - DNA, 33 bp, Homo sapiens
ggtgtttttgtgagaarccttgtagctgttact

SEQ ID NO: 1030 - DNA, 33 bp, Homo sapiens
ggttcattttcctgccygctatgtgttagtgaa

SEQ ID NO: 1031 - DNA, 33 bp, Homo sapiens
gtaatgctattttatasagttgctgtggccatt

SEQ ID NO: 1032 - DNA, 33 bp, Homo sapiens
gtaatgtgtctgtttasaccttctgcccatttt

SEQ ID NO: 1033 - DNA, 33 bp, Homo sapiens
gtatctgccaatgacarataaacgtgttctccc

SEQ ID NO: 1034 - DNA, 33 bp, Homo sapiens
gtatcttataagtcaamacatacataaccccca

SEQ ID NO: 1035 - DNA, 33 bp, Homo sapiens
gtatttttttgttctgyagcagtgttattctca

SEQ ID NO: 1036 - DNA, 33 bp, Homo sapiens
atctggggagattccasgctcatggctgctttt

SEQ ID NO: 1037 - DNA, 33 bp, Homo sapiens
gtcattagcactaaacraatagcagttaataac

SEQ ID NO: 1038 - DNA, 33 bp, Homo sapiens
gtccaaataaccaacartcattgaaataaatta

SEQ ID NO: 1039 - DNA, 33 bp, Homo sapiens
gtcgtgtctttttgcaytgattcagttactggg

SEQ ID NO: 1040 - DNA, 33 bp, Homo sapiens
gtcttttgccgcaaaayagaagaaactggaggc

SEQ ID NO: 1041 - DNA, 33 bp, Homo sapiens
gtgaggaagaacaggaygtgcaacctgtcttcc

SEQ ID NO: 1042 - DNA, 33 bp, Homo sapiens
gtgatttcttcttcacsatctgagcgaaggcag

SEQ ID NO: 1043 - DNA, 33 bp, Homo sapiens
gtgctattttccttacragacattcattccatt

SEQ ID NO: 1044 - DNA, 33 bp, Homo sapiens
gtgctgggtgtttgtaraggacttagcttccac

SEQ ID NO: 1045 - DNA, 33 bp, Homo sapiens
gtggtgggctggaacaraaaatgcaatatttca

SEQ ID NO: 1046 - DNA, 33 bp, Homo sapiens
gtggtggtacctggaaktggtggtactgacagc

SEQ ID NO: 1047 - DNA, 33 bp, Homo sapiens
gtgtatatctttccacmaacatatctacagttt

SEQ ID NO: 1048 - DNA, 33 bp, Homo sapiens
gttaacagaggatttaygtgtcccagtttatat

SEQ ID NO: 1049 - DNA, 33 bp, Homo sapiens
gttaatgaaaaggagasaaaaaccaagacacgg

SEQ ID NO: 1050 - DNA, 33 bp, Homo sapiens
gttcttctaatggagcrgcaagtctggcacccg

SEQ ID NO: 1051 - DNA, 33 bp, Homo sapiens
gttgaaaatgatgaaaraagggaagattcttat

SEQ ID NO: 1052 - DNA, 33 bp, Homo sapiens
gttgaagagtcgaaagyaataaatggtggccca

SEQ ID NO: 1053 - DNA, 33 bp, Homo sapiens
gttgtgtttttccttcyccttccctataagtca

SEQ ID NO: 1054 - DNA, 33 bp, Homo sapiens
gtttatcttctatcccrcaacctttaacgcact

SEQ ID NO: 1055 - DNA, 33 bp, Homo sapiens
gtttatttttgtctctsaatactttaagacttt

SEQ ID NO: 1056 - DNA, 33 bp, Homo sapiens
gtttccttaaggcttayacaaattgtttcatgt

SEQ ID NO: 1057 - DNA, 33 bp, Homo sapiens
gtttggcacagtcagamagcaaaaacattgcag

SEQ ID NO: 1058 - DNA, 33 bp, Homo sapiens
gtttgtacttcggatayaaatatgtgcataaaa

SEQ ID NO: 1059 - DNA, 33 bp, Homo sapiens
ttgggagggtaagtaaytggttgtgattgaaag

SEQ ID NO: 1060 - DNA, 33 bp, Homo sapiens
gttttccatttttttcrccattaagagcagtga

SEQ ID NO: 1061 - DNA, 33 bp, Homo sapiens
gatgctgttcctctcamgtgggaaaaatttggt

SEQ ID NO: 1062 - DNA, 33 bp, Homo sapiens
taaaacattttaacccsatctatgttttaaatt

SEQ ID NO: 1063 - DNA, 33 bp, Homo sapiens
taaacattatcaatgcrgatattagtagctaaa

SEQ ID NO: 1064 - DNA, 33 bp, Homo sapiens
taaagaaaaccgagaakattggagtttgcttta

SEQ ID NO: 1065 - DNA, 33 bp, Homo sapiens
taaagcagattaaagartatttggcttttgttt

SEQ ID NO: 1066 - DNA, 33 bp, Homo sapiens
taaatggtgcctctaamataaagggaaataaaa

SEQ ID NO: 1067 - DNA, 33 bp, Homo sapiens
taacattacgtttagckctgagcttcctaatta

SEQ ID NO: 1068 - DNA, 33 bp, Homo sapiens
taagaatgtattggaaygtactgagttaagaat

SEQ ID NO: 1069 - DNA, 33 bp, Homo sapiens
taagagccgggacaaaytgataaatgagctgaa

SEQ ID NO: 1070 - DNA, 33 bp, Homo sapiens
taataagcaaagtaccygattttttactgatcc

SEQ ID NO: 1071 - DNA, 33 bp, Homo sapiens
taatgatgggactcagrcataaggaaaaagcaa

SEQ ID NO: 1072 - DNA, 33 bp, Homo sapiens
taatgtgtcaaatagtsaaatctaacaaataga

SEQ ID NO: 1073 - DNA, 33 bp, Homo sapiens
taattaggatggacaartaacaccaaactagct

SEQ ID NO: 1074 - DNA, 33 bp, Homo sapiens
taatttgcccatgatcrgacacaatttaagagt

SEQ ID NO: 1075 - DNA, 33 bp, Homo sapiens
taatttttttacaccaracatctaaaattattc

SEQ ID NO: 1076 - DNA, 33 bp, Homo sapiens
tacaaataggacatcaygaaaactgcatcaaat

SEQ ID NO: 1077 - DNA, 33 bp, Homo sapiens
tacagatcaagatgtcracaaggttggttttct

SEQ ID NO: 1078 - DNA, 33 bp, Homo sapiens
tacctctaatgcactcygaggaccccaagcttt

SEQ ID NO: 1079 - DNA, 33 bp, Homo sapiens
tacgtaggttgtatctyaataaagctgtcatgg

SEQ ID NO: 1080 - DNA, 33 bp, Homo sapiens
tacgtatgggatactayactggtgaatataaga

SEQ ID NO: 1081 - DNA, 33 bp, Homo sapiens
tactcagtcacaataawtgagattcctgtttga

SEQ ID NO: 1082 - DNA, 33 bp, Homo sapiens
tactctcaaaatgacckgggtggtgaatcgaac

SEQ ID NO: 1083 - DNA, 33 bp, Homo sapiens
tacttgctattcactaygctgaaaacttttatt

SEQ ID NO: 1084 - DNA, 33 bp, Homo sapiens
tactttgtaatggaaasagcacttggaagagtt

SEQ ID NO: 1085 - DNA, 33 bp, Homo sapiens
tagaagaattttaagamggcttgtgatataatt

SEQ ID NO: 1086 - DNA, 33 bp, Homo sapiens
tagagaaataaatgccmcttgttgtggtgaaat

SEQ ID NO: 1087 - DNA, 33 bp, Homo sapiens
tagatggtattgatacmgaggttaaagaatcag

SEQ ID NO: 1088 - DNA, 33 bp, Homo sapiens
tagcaagtgagagaaawtatcttatcggggtca

SEQ ID NO: 1089 - DNA, 33 bp, Homo sapiens
tagcataaattgccacrctaccagctaattgac

SEQ ID NO: 1090 - DNA, 33 bp, Homo sapiens
tagccctagccagaggsaatcgctcatcctagc

SEQ ID NO: 1091 - DNA, 33 bp, Homo sapiens
taggatgcttttgcagwaattaacttgagtgga

SEQ ID NO: 1092 - DNA, 33 bp, Homo sapiens
tagggttcgtagaatawgagtgttttagagtga

SEQ ID NO: 1093 - DNA, 33 bp, Homo sapiens
gggtaccatgcctatcsaatttgacacatacaa

SEQ ID NO: 1094 - DNA, 33 bp, Homo sapiens
atgaaaaggatagaaasaatggagtggaaacaa

SEQ ID NO: 1095 - DNA, 33 bp, Homo sapiens
tataaggatagaaagasaggatgtaaactcaga

SEQ ID NO: 1096 - DNA, 33 bp, Homo sapiens
tatagttaaaggttaayggcaaatactcatctc

SEQ ID NO: 1097 - DNA, 33 bp, Homo sapiens
tatcacgtgaatagacrgtaacctttaataacc

SEQ ID NO: 1098 - DNA, 33 bp, Homo sapiens
tatcctctagaactgcraggaaacagatttctg

SEQ ID NO: 1099 - DNA, 33 bp, Homo sapiens
tatcgtgcttaacaaargtaatggggactgttc

SEQ ID NO: 1100 - DNA, 33 bp, Homo sapiens
tatctatgcaggcaaaytctaggccccaaggct

SEQ ID NO: 1101 - DNA, 33 bp, Homo sapiens
tatgtaaactgttccaraaggaatatgtttact

SEQ ID NO: 1102 - DNA, 33 bp, Homo sapiens
tatgtaatcttacaacrcgagtagttctctgaa

SEQ ID NO: 1103 - DNA, 33 bp, Homo sapiens
tatttgatggttaaaastgcagaatgtcgctta

SEQ ID NO: 1104 - DNA, 33 bp, Homo sapiens
tattttttcatgctgaycctgtgtaagtctttg

SEQ ID NO: 1105 - DNA, 33 bp, Homo sapiens
tcaaatcaacaatctcrctacacactcttatca

SEQ ID NO: 1106 - DNA, 33 bp, Homo sapiens
tcaacaatttgcagackcttacagttctctcca

SEQ ID NO: 1107 - DNA, 33 bp, Homo sapiens
tcacagaaacatacagrcatgcaaagggctcat

SEQ ID NO: 1108 - DNA, 33 bp, Homo sapiens
tcacatttcaatggtasgaaaagtggcttcgta

SEQ ID NO: 1109 - DNA, 33 bp, Homo sapiens
tcacctagtcaagaaarattaatccactgccaa

SEQ ID NO: 1110 - DNA, 33 bp, Homo sapiens
tcagatccttgccaagkagaaacatttgatagc

SEQ ID NO: 1111 - DNA, 33 bp, Homo sapiens
tcagctttattaaccaygatcttgcaaaaaaag

SEQ ID NO: 1112 - DNA, 33 bp, Homo sapiens
tcagtataaggtttgaygttgacattttaacaa

SEQ ID NO: 1113 - DNA, 33 bp, Homo sapiens
tcataaagtgagtttgratcctgaagaagccat

SEQ ID NO: 1114 - DNA, 33 bp, Homo sapiens
tcattgtgcaatatacraagtgtaaaacaaaat

SEQ ID NO: 1115 - DNA, 33 bp, Homo sapiens
tcatttagaactttcaraaatggataaaataat

SEQ ID NO: 1116 - DNA, 33 bp, Homo sapiens
tcatttggtgccgacgscctagaatcacacagg

SEQ ID NO: 1117 - DNA, 33 bp, Homo sapiens
tccaaaagtactttcgkattcctggcctgtaca

SEQ ID NO: 1118 - DNA, 33 bp, Homo sapiens
tccatcacaataaaccyctcttggctcccttat

SEQ ID NO: 1119 - DNA, 33 bp, Homo sapiens
tccccacctaagtcgaracagtattatcaaaac

SEQ ID NO: 1120 - DNA, 33 bp, Homo sapiens
tccctgtctttggacaygtaagaattggaggaa

SEQ ID NO: 1121 - DNA, 33 bp, Homo sapiens
tcctctgccataagccraagacattcaccagtc

SEQ ID NO: 1122 - DNA, 33 bp, Homo sapiens
tccttcctttttttcarcaaagtgagatgcaga

SEQ ID NO: 1123 - DNA, 33 bp, Homo sapiens
tctaaaccagttaagcrgcagaataaatgtgca

SEQ ID NO: 1124 - DNA, 33 bp, Homo sapiens
tctacagcatctttgcsagttcactgaagcgct

SEQ ID NO: 1125 - DNA, 33 bp, Homo sapiens
tctactccttcaaaaasaagactccagtggcta

SEQ ID NO: 1126 - DNA, 33 bp, Homo sapiens
tctaggaccactgttaygatttaacttcatgga

SEQ ID NO: 1127 - DNA, 33 bp, Homo sapiens
tctattcactctaaaayggcagcagggttgagt

SEQ ID NO: 1128 - DNA, 33 bp, Homo sapiens
tctcattggagacatasagcttaagcaggcgtc

SEQ ID NO: 1129 - DNA, 33 bp, Homo sapiens
tctgagaacataacagsattctaatgtgttggc

SEQ ID NO: 1130 - DNA, 33 bp, Homo sapiens
tctggcactagtaacayacagtgaacattacag

SEQ ID NO: 1131 - DNA, 33 bp, Homo sapiens
tcttcctcaacagccastgaatcagttccatcc

SEQ ID NO: 1132 - DNA, 33 bp, Homo sapiens
tcttggtcatggggaaygggcttagagcttccc

SEQ ID NO: 1133 - DNA, 33 bp, Homo sapiens
tctttagcatatattgmaattcagaccttttta

SEQ ID NO: 1134 - DNA, 33 bp, Homo sapiens
tgaaaagtggaagctcractggttttttaattt

SEQ ID NO: 1135 - DNA, 33 bp, Homo sapiens
tgaaatgacctgaaagragatttgcatatatag

SEQ ID NO: 1136 - DNA, 33 bp, Homo sapiens
tgaacacaaaggccatragaagagtgtttccaa

SEQ ID NO: 1137 - DNA, 33 bp, Homo sapiens
tgaacctggactagaasacagaataaactatga

SEQ ID NO: 1138 - DNA, 33 bp, Homo sapiens
tgaagataatatgaacsgagtgagatgtaacag

SEQ ID NO: 1139 - DNA, 33 bp, Homo sapiens
tgaatatttctacacartaaatgcataagtaca

SEQ ID NO: 1140 - DNA, 33 bp, Homo sapiens
tgaattctcggcaaaamcatcctctgagtctga

SEQ ID NO: 1141 - DNA, 33 bp, Homo sapiens
tgacttttatttttcartctcatccttatcaac

SEQ ID NO: 1142 - DNA, 33 bp, Homo sapiens
tgagaaatgctgctgarcacagttaaatatggg

SEQ ID NO: 1143 - DNA, 33 bp, Homo sapiens
tgagaactacccaactragccaaagtaacccac

SEQ ID NO: 1144 - DNA, 33 bp, Homo sapiens
tgagaatacagctctayggattttgtcaagtgt

SEQ ID NO: 1145 - DNA, 33 bp, Homo sapiens
tgagttaagcacctaamaggagtttgcttccat

SEQ ID NO: 1146 - DNA, 33 bp, Homo sapiens
tgagttggctgaggccyatgttagcagatgggg

SEQ ID NO: 1147 - DNA, 33 bp, Homo sapiens
tgatactatactgtgamacatggtaagtatttg

SEQ ID NO: 1148 - DNA, 33 bp, Homo sapiens
tgatgacattataaaargaagagagacaggagc

SEQ ID NO: 1149 - DNA, 33 bp, Homo sapiens
tgatgcctgcacagcayggcggttggaattcat

SEQ ID NO: 1150 - DNA, 33 bp, Homo sapiens
tgattaaactttctacratttatgcgcaacact

SEQ ID NO: 1151 - DNA, 33 bp, Homo sapiens
tgattctggggataaarctgtgaaccagataaa

SEQ ID NO: 1152 - DNA, 33 bp, Homo sapiens
tgcactgccagttgcayaaaagtatagcacata

SEQ ID NO: 1153 - DNA, 33 bp, Homo sapiens
tgcagctaatctaaaayggagaatagagagcaa

SEQ ID NO: 1154 - DNA, 33 bp, Homo sapiens
tgcatccaagggctgaygaatatttgcaacacc

SEQ ID NO: 1155 - DNA, 33 bp, Homo sapiens
tgcattaaaatctgtascaggaatcacttctgc

SEQ ID NO: 1156 - DNA, 33 bp, Homo sapiens
tgccaacataacaccaygagtggaaaattccac

SEQ ID NO: 1157 - DNA, 33 bp, Homo sapiens
tgccagagtcatgtgamcttgtggagtagatgc

SEQ ID NO: 1158 - DNA, 33 bp, Homo sapiens
tggaggaaaacctcacygacttggcaacatttg

SEQ ID NO: 1159 - DNA, 33 bp, Homo sapiens
tggcatttggaataagrctaaggtgtgtgttct

SEQ ID NO: 1160 - DNA, 33 bp, Homo sapiens
tggcttagattcatacrctttggagtagaagtg

SEQ ID NO: 1161 - DNA, 33 bp, Homo sapiens
tgggagaccctcgatgsaggtttgtggagggaa

SEQ ID NO: 1162 - DNA, 33 bp, Homo sapiens
tggtaattggcttcccmagctaggttttctgga

SEQ ID NO: 1163 - DNA, 33 bp, Homo sapiens
tggtctgaaattgagaygcttattgaatgctta

SEQ ID NO: 1164 - DNA, 33 bp, Homo sapiens
tggtggaccatggatgracccagttacagggtt

SEQ ID NO: 1165 - DNA, 33 bp, Homo sapiens
tggttactaaggtgccrattctcccaatactgc

SEQ ID NO: 1166 - DNA, 33 bp, Homo sapiens
tgtaagtcatgtatcckattagagacttctatc

SEQ ID NO: 1167 - DNA, 33 bp, Homo sapiens
tgtaggtgtgaagggcrgaaggatggagatggt

SEQ ID NO: 1168 - DNA, 33 bp, Homo sapiens
tgtagtagaatgatccmagtcctaataccctag

SEQ ID NO: 1169 - DNA, 33 bp, Homo sapiens
tgtagtttctaagcacratgtcctgaaagtctg

SEQ ID NO: 1170 - DNA, 33 bp, Homo sapiens
tgtcagtccagaggagyctacaaagatatgaca

SEQ ID NO: 1171 - DNA, 33 bp, Homo sapiens
tgtccatacttgtggamgttttttctattgaag

SEQ ID NO: 1172 - DNA, 33 bp, Homo sapiens
tgtggaaataacaaaartgggatatgaacctca

SEQ ID NO: 1173 - DNA, 33 bp, Homo sapiens
tgtggctcacgtgtaawgtctctgaatttcctt

SEQ ID NO: 1174 - DNA, 33 bp, Homo sapiens
tgtgggcaagtcacacwcatgcaaatatgtgag

SEQ ID NO: 1175 - DNA, 33 bp, Homo sapiens
tgtggttctaatgcackaattaaatatctgtct

SEQ ID NO: 1176 - DNA, 33 bp, Homo sapiens
tgttgaaatttaaggakatataactcttgacac

SEQ ID NO: 1177 - DNA, 33 bp, Homo sapiens
tgttgtaatgttagaaragtagaacagcttgtg

SEQ ID NO: 1178 - DNA, 33 bp, Homo sapiens
tgttgttgcgtttcacygctgggaaatggaaag

SEQ ID NO: 1179 - DNA, 33 bp, Homo sapiens
tgttttacaaatagtamcctttacaaatagtaa

SEQ ID NO: 1180 - DNA, 33 bp, Homo sapiens
tgttttcagagatatcyatctaatcttcctgat

SEQ ID NO: 1181 - DNA, 33 bp, Homo sapiens
tgttttcattatgctawgtacaagattgtgcta

SEQ ID NO: 1182 - DNA, 33 bp, Homo sapiens
tgttttctgtcttgtaratttctgttactcttt

SEQ ID NO: 1183 - DNA, 33 bp, Homo sapiens
ttaaaaagagtgaaaartagaggtgcaaatcct

SEQ ID NO: 1184 - DNA, 33 bp, Homo sapiens
ttaatctcaccatgaawagtcaaagagaagagg

SEQ ID NO: 1185 - DNA, 33 bp, Homo sapiens
ttaccaatgaccaaaarcacataccaacgtaaa

SEQ ID NO: 1186 - DNA, 33 bp, Homo sapiens
ttacctcctgggtaacyggtggaggtaagtgat

SEQ ID NO: 1187 - DNA, 33 bp, Homo sapiens
ttagatattaaggtcawctgaaacttgatagag

SEQ ID NO: 1188 - DNA, 33 bp, Homo sapiens
ttaggtccaggtttctyaacagcagtgctactg

SEQ ID NO: 1189 - DNA, 33 bp, Homo sapiens
ttaggtgtttccttgcyaaattaagccacttca

SEQ ID NO: 1190 - DNA, 33 bp, Homo sapiens
ttagtcttctatatcawccagaaagaggtcctt

SEQ ID NO: 1191 - DNA, 33 bp, Homo sapiens
ttatcaaattttcaaarttactcacgccatcac

SEQ ID NO: 1192 - DNA, 33 bp, Homo sapiens
ttatctactgatttacmcaatttacagagccac

SEQ ID NO: 1193 - DNA, 33 bp, Homo sapiens
ttatgccagactataargcaatatttaggaatt

SEQ ID NO: 1194 - DNA, 33 bp, Homo sapiens
ttatgcctctacctcarattcctcaactaggga

SEQ ID NO: 1195 - DNA, 33 bp, Homo sapiens
ttattaaacatgatacmcaaagtacagtgaaaa

SEQ ID NO: 1196 - DNA, 33 bp, Homo sapiens
ttatttctaagtaaggycatattcacaggtaca

SEQ ID NO: 1197 - DNA, 33 bp, Homo sapiens
ttcaaaacttactatarcactgcggtaatcaag

SEQ ID NO: 1198 - DNA, 33 bp, Homo sapiens
ttcacacaactaccaaygtccagaggcgggatt

SEQ ID NO: 1199 - DNA, 33 bp, Homo sapiens
ttcacctcttgacttgragccttataaactaga

SEQ ID NO: 1200 - DNA, 33 bp, Homo sapiens
ttcacttggaagaaaaygtaagcaaaagtagcc

SEQ ID NO: 1201 - DNA, 33 bp, Homo sapiens
ttccacaaattgttaawcaaactttctgtagaa

SEQ ID NO: 1202 - DNA, 33 bp, Homo sapiens
ttccacttcagctgtcratcatacacttgccca

SEQ ID NO: 1203 - DNA, 33 bp, Homo sapiens
aaactacacatagcaawcctcaaatttgaacag

SEQ ID NO: 1204 - DNA, 33 bp, Homo sapiens
ttcctgttgagggcaayggaagaatttggcaaa

SEQ ID NO: 1205 - DNA, 33 bp, Homo sapiens
ttcgttcctctggtagsaattgttgagtcaaaa

SEQ ID NO: 1206 - DNA, 33 bp, Homo sapiens
ttctcttgcaagcaacrgaaaaagagaagaaaa

SEQ ID NO: 1207 - DNA, 33 bp, Homo sapiens
ttctgtaggacatcaarataatcagtttcctta

SEQ ID NO: 1208 - DNA, 33 bp, Homo sapiens
ttctttgctatcttctraaaaattcaccatcat

SEQ ID NO: 1209 - DNA, 33 bp, Homo sapiens
ttctttttattggctakctttatgttcgctttc

SEQ ID NO: 1210 - DNA, 33 bp, Homo sapiens
ttgaaacctgtttcccyggagctgacacagggc

SEQ ID NO: 1211 - DNA, 33 bp, Homo sapiens
ttgacagttttccaagmagaattaaggtttcca

SEQ ID NO: 1212 - DNA, 33 bp, Homo sapiens
ttgcacaatgtaaaccmcaggacttatggagaa

SEQ ID NO: 1213 - DNA, 33 bp, Homo sapiens
ttgcgggtttgtatgayagagacaagaaagcac

SEQ ID NO: 1214 - DNA, 33 bp, Homo sapiens
ttgcttcagcactctascaaaggccaacctccc

SEQ ID NO: 1215 - DNA, 33 bp, Homo sapiens
ttggggccaggaaccakccttagtattcaggca

SEQ ID NO: 1216 - DNA, 33 bp, Homo sapiens
ttggtttctaactaacrcaacgtctaagaagca

SEQ ID NO: 1217 - DNA, 33 bp, Homo sapiens
ttgtgtagagtaactcyatgcgtaaacagtttc

SEQ ID NO: 1218 - DNA, 33 bp, Homo sapiens
ttgttcattccacaaayagttgttaagtgaagg

SEQ ID NO: 1219 - DNA, 33 bp, Homo sapiens
ttgtttggttaggtggwataggcaatattctga

SEQ ID NO: 1220 - DNA, 33 bp, Homo sapiens
ttgtttgtttttaagakctctccaaaatctaga

SEQ ID NO: 1221 - DNA, 33 bp, Homo sapiens
ttgttttgtatcatggmaaatcctgacaacatg

SEQ ID NO: 1222 - DNA, 33 bp, Homo sapiens
tttaaaaaacatcccaytgactacaaatggatg

SEQ ID NO: 1223 - DNA, 33 bp, Homo sapiens
tttaaaatgtattgcakagtttttggcttattt

SEQ ID NO: 1224 - DNA, 33 bp, Homo sapiens
tttaaccacagtataaygcctttcaaaattgga

SEQ ID NO: 1225 - DNA, 33 bp, Homo sapiens
tttaatatcaaatgtgwaataggaaatgtatta

SEQ ID NO: 1226 - DNA, 33 bp, Homo sapiens
tttaccttttaacatayctggaattggaatgta

SEQ ID NO: 1227 - DNA, 33 bp, Homo sapiens
tttactgtgcactgaamaggtctctatattttg

SEQ ID NO: 1228 - DNA, 33 bp, Homo sapiens
tttagaacatgtagcawcatcttagaggtctat

SEQ ID NO: 1229 - DNA, 33 bp, Homo sapiens
tttagtaagacaattcrcctaacagataagaaa

SEQ ID NO: 1230 - DNA, 33 bp, Homo sapiens
tttatgataacttgccyatccagaaatgctgag

SEQ ID NO: 1231 - DNA, 33 bp, Homo sapiens
tttccccagaacggtcmagattcactgacagag

SEQ ID NO: 1232 - DNA, 33 bp, Homo sapiens
tttctacacctctctcwgaaaggaaatgtcaac

SEQ ID NO: 1233 - DNA, 33 bp, Homo sapiens
tttgagaaaagagagaraatagcatgaatgttt

SEQ ID NO: 1234 - DNA, 33 bp, Homo sapiens
tttgctaaaagtcttcraaagatttgccaagtt

SEQ ID NO: 1235 - DNA, 33 bp, Homo sapiens
tttgcttgcaagcgaayggcttcccagggagcg

SEQ ID NO: 1236 - DNA, 33 bp, Homo sapiens
tttggtagctcataaawtcatcaggaatactgc

SEQ ID NO: 1237 - DNA, 33 bp, Homo sapiens
tttggtgtggcatccastatagtctgtttaatg

SEQ ID NO: 1238 - DNA, 33 bp, Homo sapiens
ttttacaggtgaagacrctaagacacagagagg

SEQ ID NO: 1239 - DNA, 33 bp, Homo sapiens
ttttgccttaatttgcrcaatcatttccatatt

SEQ ID NO: 1240 - DNA, 33 bp, Homo sapiens
tttttaagatgattgasagactgagtaaaagtt

SEQ ID NO: 1241 - DNA, 33 bp, Homo sapiens
tttttctttgcttcccrgatattagcagggaag

SEQ ID NO: 1242 - DNA, 33 bp, Homo sapiens
ttttttgtgtgcacaamggtgactttacagcct

SEQ ID NO: 1243 - DNA, 33 bp, Homo sapiens
atccgcagggctgtcaycttttctccaagctcc

SEQ ID NO: 1244 - DNA, 33 bp, Homo sapiens
ccctgggtcagcgccaraagaaaacctggaggg

SEQ ID NO: 1245 - DNA, 33 bp, Homo sapiens
ttccctttgagttttasggtgataatagctggc

SEQ ID NO: 1246 - DNA, 33 bp, Homo sapiens
gactaaaatattcctaygtgtattcaatcagtt

SEQ ID NO: 1247 - DNA, 33 bp, Homo sapiens
ctttcttgaaactgacrgcaactccaacagctc

SEQ ID NO: 1248 - DNA, 33 bp, Homo sapiens
tggttcatacctgactsaatttcatttttaatt

SEQ ID NO: 1249 - DNA, 33 bp, Homo sapiens
gtgttaaagtaccaaargctccaatttactaag

SEQ ID NO: 1250 - DNA, 33 bp, Homo sapiens
tcacggtagacacatakattgtactgctgcatg

SEQ ID NO: 1251 - DNA, 33 bp, Homo sapiens
aataaaaggctgtgacrgagactttaatggggc

SEQ ID NO: 1252 - DNA, 33 bp, Homo sapiens
tacaaatactttttaaygccacctggccaattc

SEQ ID NO: 1253 - DNA, 33 bp, Homo sapiens
agaggattttcgatgawgtgaatggcaggaata

SEQ ID NO: 1254 - DNA, 33 bp, Homo sapiens
tgtacatacaactcatraaatctacatacatta

SEQ ID NO: 1255 - DNA, 33 bp, Homo sapiens
gatgcttaagaaatacrctgtttcaagcctcaa

SEQ ID NO: 1256 - DNA, 33 bp, Homo sapiens
actgtgatgaagatgcmgacactccaggattca

SEQ ID NO: 1257 - DNA, 33 bp, Homo sapiens
aataacttctgctacaygcagtttctcaagacc

SEQ ID NO: 1258 - DNA, 33 bp, Homo sapiens
ttgcatctttgggttamggctctgctgcccttg

SEQ ID NO: 1259 - DNA, 33 bp, Homo sapiens
gacagaacaagacaaayggcaggtggacttggg

SEQ ID NO: 1260 - DNA, 33 bp, Homo sapiens
tcctcctgagctggccrattattttctgctact

SEQ ID NO: 1261 - DNA, 33 bp, Homo sapiens
ggagttggatagcaatratatttaacagtcatt

SEQ ID NO: 1262 - DNA, 33 bp, Homo sapiens
caagtgcttcttcatakcatggtaagaagacat

SEQ ID NO: 1263 - DNA, 33 bp, Homo sapiens
cagggcacaagctggasgcagcaaatgggcaaa

SEQ ID NO: 1264 - DNA, 33 bp, Homo sapiens
acactattggtaaacaragcagaagtaatgtca

SEQ ID NO: 1265 - DNA, 33 bp, Homo sapiens
acttactgaagcctgaratgtagcccattaatt

SEQ ID NO: 1266 - DNA, 33 bp, Homo sapiens
aaaggatacagccatgrcaaaagaggaaacatt

SEQ ID NO: 1267 - DNA, 33 bp, Homo sapiens
taaaataaaaataaaawgactcaagtgtacatg

SEQ ID NO: 1268 - DNA, 33 bp, Homo sapiens
tcagcttaggtctcttyaaacgtgtgcaatcat

SEQ ID NO: 1269 - DNA, 33 bp, Homo sapiens
aaggaagagtttgacaygaagtaaaagtctctg

SEQ ID NO: 1270 - DNA, 33 bp, Homo sapiens
tgaagaggagaaaaacrctacataacgtgctaa

SEQ ID NO: 1271 - DNA, 33 bp, Homo sapiens
caaaatgttgcttttargtcgagatcaggtaaa

SEQ ID NO: 1272 - DNA, 33 bp, Homo sapiens
taataataaatcatcartcccttcgtgagtgtt

SEQ ID NO: 1273 - DNA, 33 bp, Homo sapiens
tctaatacctgatgacstaatctttttattgct

SEQ ID NO: 1274 - DNA, 33 bp, Homo sapiens
taggggcactttggggrcattttggtttggcat

SEQ ID NO: 1275 - DNA, 33 bp, Homo sapiens
agctaactaggccaaakctaataaggatcatga

SEQ ID NO: 1276 - DNA, 33 bp, Homo sapiens
accaaaatacaaggcastgaaatctggtgcatt

SEQ ID NO: 1277 - DNA, 33 bp, Homo sapiens
tgacttctgctgtccakgagcttataatataac

SEQ ID NO: 1278 - DNA, 33 bp, Homo sapiens
ctttatggttcaaaacyagacaacaattactat

SEQ ID NO: 1279 - DNA, 33 bp, Homo sapiens
atattggtttccccagscagtcattttcttagg

SEQ ID NO: 1280 - DNA, 33 bp, Homo sapiens
caaatattactgtttgyatccaacaagagaaaa

SEQ ID NO: 1281 - DNA, 33 bp, Homo sapiens
tccaaatcaagattccycagacatagcttcata

SEQ ID NO: 1282 - DNA, 33 bp, Homo sapiens
tgctaccaataaacagraaggaggattcttgta

SEQ ID NO: 1283 - DNA, 33 bp, Homo sapiens
ctgcgaaacccgtccamgcgaaattgagttctt

SEQ ID NO: 1284 - DNA, 33 bp, Homo sapiens
taatggctttttgctaycacaactcctcctccc

SEQ ID NO: 1285 - DNA, 33 bp, Homo sapiens
ggtgtattgcccatggycagagaggaaattaag

SEQ ID NO: 1286 - DNA, 33 bp, Homo sapiens
gtctattagatgaacarctacaagtctcttcta

SEQ ID NO: 1287 - DNA, 33 bp, Homo sapiens
ggcattgacatctttaygagtgactttccatcc

SEQ ID NO: 1288 - DNA, 33 bp, Homo sapiens
atactgaagcaacagcratcgtattcatagtca

SEQ ID NO: 1289 - DNA, 33 bp, Homo sapiens
tcagtctctaaagtaaycaagtcaattcactat

SEQ ID NO: 1290 - DNA, 33 bp, Homo sapiens
taattttggtgtcagaygttaaaaatgataggg

SEQ ID NO: 1291 - DNA, 33 bp, Homo sapiens
agaaaatcgcgtaagawgtcaatatgctgttta

SEQ ID NO: 1292 - DNA, 33 bp, Homo sapiens
taggagcttagctctcycgactctcgggccact

SEQ ID NO: 1293 - DNA, 33 bp, Homo sapiens
aaagtagaatgtgatcraaaaaactctcagttg

SEQ ID NO: 1294 - DNA, 33 bp, Homo sapiens
gccaaactcacaaagascttgaaagtctctctc

SEQ ID NO: 1295 - DNA, 33 bp, Homo sapiens
aagagatgtatttcaaratgcgaaattaacagt

SEQ ID NO: 1296 - DNA, 33 bp, Homo sapiens
ctgtagacacatatgartcaaacacctgtaaac

SEQ ID NO: 1297 - DNA, 33 bp, Homo sapiens
ctcctcgtagtacagaytaattttcaaaatagt

SEQ ID NO: 1298 - DNA, 33 bp, Homo sapiens
tggctgcctggttgtckctgattgaatggtcct

SEQ ID NO: 1299 - DNA, 33 bp, Homo sapiens
ttggtgccatctctttsaaaagcaattgaaaat

SEQ ID NO: 1300 - DNA, 33 bp, Homo sapiens
atgaaaacattttgtaygggatctgatgattga

SEQ ID NO: 1301 - DNA, 33 bp, Homo sapiens
attagagactgggccarctgagtagccacaggg

SEQ ID NO: 1302 - DNA, 33 bp, Homo sapiens
tgcattgcaaaactctraagaacagcattctta

SEQ ID NO: 1303 - DNA, 33 bp, Homo sapiens
ccagacagtctaactcragagcacttttatctt

SEQ ID NO: 1304 - DNA, 33 bp, Homo sapiens
gaatctcactcataaamatcacctctgaaaatc

SEQ ID NO: 1305 - DNA, 33 bp, Homo sapiens
tttaagtgttgattgtraaacaagacagattgg

SEQ ID NO: 1306 - DNA, 33 bp, Homo sapiens
aagaaaaacagaggacrggaattacacaggtcc

SEQ ID NO: 1307 - DNA, 33 bp, Homo sapiens
ttcccctttgttagaaytgtcctcttctctgca

SEQ ID NO: 1308 - DNA, 33 bp, Homo sapiens
aacatttaaaactacaratagcactgcagcttg

SEQ ID NO: 1309 - DNA, 33 bp, Homo sapiens
aggtctaggttagttamcacaaaagtaggtcat

SEQ ID NO: 1310 - DNA, 33 bp, Homo sapiens
tttttgctatttgcaaygtcacaatagttttaa

SEQ ID NO: 1311 - DNA, 33 bp, Homo sapiens
ttcttttttcaaacccragcaaggaaaatcaga

SEQ ID NO: 1312 - DNA, 33 bp, Homo sapiens
actttgcatctgtaacyaactgtgatcctcatt

SEQ ID NO: 1313 - DNA, 33 bp, Homo sapiens
catggtttggatttgargaaaggaggagtgcaa

SEQ ID NO: 1314 - DNA, 33 bp, Homo sapiens
gaagcacagaaggagakgaaagtgaaatagcca

SEQ ID NO: 1315 - DNA, 33 bp, Homo sapiens
agcatttttgagtgcasaggtaggcaggaaaga

SEQ ID NO: 1316 - DNA, 33 bp, Homo sapiens
actcagaactcttgacwaatcatgtagttttct

SEQ ID NO: 1317 - DNA, 33 bp, Homo sapiens
ctgatgaagatttcaamacctggagaatatttt

SEQ ID NO: 1318 - DNA, 33 bp, Homo sapiens
aaacttgttttctttcrctttctccggctttat

SEQ ID NO: 1319 - DNA, 33 bp, Homo sapiens
cctaagaattgtgaaartttactgattagaatt

SEQ ID NO: 1320 - DNA, 33 bp, Homo sapiens
ctgtgaggaatgctagratggaaatgctaatta

SEQ ID NO: 1321 - DNA, 33 bp, Homo sapiens
cctatagacgtttttasgaatttggattttata

SEQ ID NO: 1322 - DNA, 33 bp, Homo sapiens
cacaaggtaatgtagaygggcctcaatcccagg

SEQ ID NO: 1323 - DNA, 33 bp, Homo sapiens
tctgttgttttctatargttagattgcccattg

SEQ ID NO: 1324 - DNA, 33 bp, Homo sapiens
aagcagcctgtgtgcamgtagaatttttttccc

SEQ ID NO: 1325 - DNA, 33 bp, Homo sapiens
tagcaaatggctaaaaytgcattctttgcttcc

SEQ ID NO: 1326 - DNA, 33 bp, Homo sapiens
agggccataaaactgayggtgcaagctgaaact

SEQ ID NO: 1327 - DNA, 33 bp, Homo sapiens
aggcaacagccaaaaarccgatggagtcaatgg

SEQ ID NO: 1328 - DNA, 33 bp, Homo sapiens
tgaggggttccagttawctcttttctcaccagc

SEQ ID NO: 1329 - DNA, 33 bp, Homo sapiens
tccattgtcagccttcygaaaggacttgagatt

SEQ ID NO: 1330 - DNA, 33 bp, Homo sapiens
aaaaaaattcagcacckggaaatcaacattttg

SEQ ID NO: 1331 - DNA, 33 bp, Homo sapiens
aaaacagaggacacctwaaaatgataaggccat

SEQ ID NO: 1332 - DNA, 33 bp, Homo sapiens
aaaactttctaattgayggagtggctgtagttt

SEQ ID NO: 1333 - DNA, 33 bp, Homo sapiens
aaaagggaacaaactaygccactaccttatcag

SEQ ID NO: 1334 - DNA, 33 bp, Homo sapiens
aaaagtttattaaatamgtacacagaggccata

SEQ ID NO: 1335 - DNA, 33 bp, Homo sapiens
aaaatctttctactccyactgaattcctcaaca

SEQ ID NO: 1336 - DNA, 33 bp, Homo sapiens
aaacaatattttcaaaygtcctcaataaaatag

SEQ ID NO: 1337 - DNA, 33 bp, Homo sapiens
aaacacactctctttcrcttaagtttcttaaca

SEQ ID NO: 1338 - DNA, 33 bp, Homo sapiens
aaaccaaacaaagcaarataacacaaaacttta

SEQ ID NO: 1339 - DNA, 33 bp, Homo sapiens
aaactaaagccattaargtgcgtataaaattga

SEQ ID NO: 1340 - DNA, 33 bp, Homo sapiens
aaagcaatgaaactgartaagtcaattctagaa

SEQ ID NO: 1341 - DNA, 33 bp, Homo sapiens
aaagccaggcttatgawctaaccagaagtgcag

SEQ ID NO: 1342 - DNA, 33 bp, Homo sapiens
aaagggatataatagasagaaatggttgaaaaa

SEQ ID NO: 1343 - DNA, 33 bp, Homo sapiens
aaagtaaacagttggayggaattttatcaattg

SEQ ID NO: 1344 - DNA, 33 bp, Homo sapiens
aaatacaggtgatctamacaagggaagatgctg

SEQ ID NO: 1345 - DNA, 33 bp, Homo sapiens
cctgggccaatttgcaycaggtacagttggagc

SEQ ID NO: 1346 - DNA, 33 bp, Homo sapiens
aaatagtccttaggctyaaaagtggtatatgtt

SEQ ID NO: 1347 - DNA, 33 bp, Homo sapiens
aaatctcccggaagaargactgaattaaatgca

SEQ ID NO: 1348 - DNA, 33 bp, Homo sapiens
aaatcttgttatgtagwatcgaatcatgtgaaa

SEQ ID NO: 1349 - DNA, 33 bp, Homo sapiens
aaatggcccaggctgcmaaaaaggggagcagca

SEQ ID NO: 1350 - DNA, 33 bp, Homo sapiens
aaatgtcatcaatcagmattttcagtaaataat

SEQ ID NO: 1351 - DNA, 33 bp, Homo sapiens
aaattactaaatgtgawgttgatcagaaacaca

SEQ ID NO: 1352 - DNA, 33 bp, Homo sapiens
aaattctcacaaccacrataagagctaggtact

SEQ ID NO: 1353 - DNA, 33 bp, Homo sapiens
aaatttagcctccaagwagagatctgctccaag

SEQ ID NO: 1354 - DNA, 33 bp, Homo sapiens
aaatttggccacagaarctggctaggaaaaaac

SEQ ID NO: 1355 - DNA, 33 bp, Homo sapiens
aacaattatagggtacragaaagactattacaa

SEQ ID NO: 1356 - DNA, 33 bp, Homo sapiens
gcccaccatttaagtgygataatttgtcagtgt

SEQ ID NO: 1357 - DNA, 33 bp, Homo sapiens
aacattcttgtgtaggyccagaaaacggattta

SEQ ID NO: 1358 - DNA, 33 bp, Homo sapiens
aacatttgaattaacartccttgctgtgtgtgt

SEQ ID NO: 1359 - DNA, 33 bp, Homo sapiens
aaccaagaagcactcartacatgctccatacat

SEQ ID NO: 1360 - DNA, 33 bp, Homo sapiens
aactcacgcacgtgacratattaaaggacccac

SEQ ID NO: 1361 - DNA, 33 bp, Homo sapiens
aactgctgtgatccaayaagtctaagtaatata

SEQ ID NO: 1362 - DNA, 33 bp, Homo sapiens
aactgttagaaacatayacaaacaggcctctta

SEQ ID NO: 1363 - DNA, 33 bp, Homo sapiens
aacttgctctctcaaayggaaactgggaccctc

SEQ ID NO: 1364 - DNA, 33 bp, Homo sapiens
aagaaagagtgtttccraaagtgaaagggaaga

SEQ ID NO: 1365 - DNA, 33 bp, Homo sapiens
aagaaggcctcgtaggraaaagaaatgggggca

SEQ ID NO: 1366 - DNA, 33 bp, Homo sapiens
aagactgcaaagcaacyagctaaaaacaccaag

SEQ ID NO: 1367 - DNA, 33 bp, Homo sapiens
aagactttcatccaccrgaagggcatatcaaaa

SEQ ID NO: 1368 - DNA, 33 bp, Homo sapiens
aagatctgtttttctcyccacacattcgtctag

SEQ ID NO: 1369 - DNA, 33 bp, Homo sapiens
aagctgcatagatagayagtgagccttcagcta

SEQ ID NO: 1370 - DNA, 33 bp, Homo sapiens
aaggaagtagcctagcracctacaaaaatcttt

SEQ ID NO: 1371 - DNA, 33 bp, Homo sapiens
aaggaggggttaaaaastagctgagcatgatgg

SEQ ID NO: 1372 - DNA, 33 bp, Homo sapiens
aagggacagaatggaakagagagtatcagagta

SEQ ID NO: 1373 - DNA, 33 bp, Homo sapiens
aagggagaggatcaaarttacctgttcaaataa

SEQ ID NO: 1374 - DNA, 33 bp, Homo sapiens
aagggcaactggaagakgaagaagaaggagaag

SEQ ID NO: 1375 - DNA, 33 bp, Homo sapiens
aaggggagatagacaamataaacctgcaagtca

SEQ ID NO: 1376 - DNA, 33 bp, Homo sapiens
aagtcccagctcttgasgtgtacaagatgagag

SEQ ID NO: 1377 - DNA, 33 bp, Homo sapiens
aagtccctagtaaaagrcataataaatgcaaat

SEQ ID NO: 1378 - DNA, 33 bp, Homo sapiens
aagtgcctcggatctcyactttatctgttaata

SEQ ID NO: 1379 - DNA, 33 bp, Homo sapiens
aagttagcctaaaacasaaattcaggccatgat

SEQ ID NO: 1380 - DNA, 33 bp, Homo sapiens
aataacggaaagacctraatttaagaggcttgg

SEQ ID NO: 1381 - DNA, 33 bp, Homo sapiens
aatattgatgaatcctsaaaaaatgctagcaaa

SEQ ID NO: 1382 - DNA, 33 bp, Homo sapiens
aatcagaaatacttaaygttgcactttcggtca

SEQ ID NO: 1383 - DNA, 33 bp, Homo sapiens
aatctatgtcatgttcraggcagagacagatgt

SEQ ID NO: 1384 - DNA, 33 bp, Homo sapiens
aatctctgaaaggacamtaggcaacacagcaaa

SEQ ID NO: 1385 - DNA, 33 bp, Homo sapiens
aatgtaaatctgcaaaygcctaaacttaaaaaa

SEQ ID NO: 1386 - DNA, 33 bp, Homo sapiens
aatgtttgccgagtgaycccatgagcgagtgat

SEQ ID NO: 1387 - DNA, 33 bp, Homo sapiens
aattcataactataatragcatcaagttaacta

SEQ ID NO: 1388 - DNA, 33 bp, Homo sapiens
aattgctaaatgagccratggacttaaatcagc

SEQ ID NO: 1389 - DNA, 33 bp, Homo sapiens
aatttcccccaatcaawcaatctttacctacag

SEQ ID NO: 1390 - DNA, 33 bp, Homo sapiens
aatttcttttcagcccygaggtacatatttttt

SEQ ID NO: 1391 - DNA, 33 bp, Homo sapiens
aattttatatttctacyggcagtttgaatggta

SEQ ID NO: 1392 - DNA, 33 bp, Homo sapiens
acaaaatgaatgatgargttaaacacccaagct

SEQ ID NO: 1393 - DNA, 33 bp, Homo sapiens
acaaacaaatagcacaytgccttgggcagagta

SEQ ID NO: 1394 - DNA, 33 bp, Homo sapiens
acaagaatccaactaaygtaactgaacacttag

SEQ ID NO: 1395 - DNA, 33 bp, Homo sapiens
acaagggaaatgtaaargtggaacaaagcagta

SEQ ID NO: 1396 - DNA, 33 bp, Homo sapiens
acaagtgtaacagaaawggaatgacagaaaaaa

SEQ ID NO: 1397 - DNA, 33 bp, Homo sapiens
acagattgcaagaaaawctttgtgaagtacata

SEQ ID NO: 1398 - DNA, 33 bp, Homo sapiens
acagcctgtgctcaatsaatatagttctaaaag

SEQ ID NO: 1399 - DNA, 33 bp, Homo sapiens
acagctgttccatctcrattacaaagctctgaa

SEQ ID NO: 1400 - DNA, 33 bp, Homo sapiens
acaggatctagtgctcrattgcaagcaggtgac

SEQ ID NO: 1401 - DNA, 33 bp, Homo sapiens
acatgaacacaattcarctaaattctttgccac

SEQ ID NO: 1402 - DNA, 33 bp, Homo sapiens
acatgcctccatccacygaaggcagccctgcat

SEQ ID NO: 1403 - DNA, 33 bp, Homo sapiens
acatttagattgtttcraaaagtttactatttt

SEQ ID NO: 1404 - DNA, 33 bp, Homo sapiens
accacaagcaacggacwagtaggggaagagtcg

SEQ ID NO: 1405 - DNA, 33 bp, Homo sapiens
accatagttccaaaacsctgttcaagtagaagc

SEQ ID NO: 1406 - DNA, 33 bp, Homo sapiens
acccattggtttctaaygatactggccttttct

SEQ ID NO: 1407 - DNA, 33 bp, Homo sapiens
acccttcagtcaaggasgtagacatcaagagcc

SEQ ID NO: 1408 - DNA, 33 bp, Homo sapiens
accggcttgccctatakcccactttcttatagc

SEQ ID NO: 1409 - DNA, 33 bp, Homo sapiens
acctgagggagtaccckgaagacagcacacaga

SEQ ID NO: 1410 - DNA, 33 bp, Homo sapiens
agctctgcagacctgayagatgtggcaaataca

SEQ ID NO: 1411 - DNA, 33 bp, Homo sapiens
acgcttacaatattcawgtttaacctactccat

SEQ ID NO: 1412 - DNA, 33 bp, Homo sapiens
actcacaacatgatcaraattaggagcagtctc

SEQ ID NO: 1413 - DNA, 33 bp, Homo sapiens
actcatacgttcagcaktacaccattcacaata

SEQ ID NO: 1414 - DNA, 33 bp, Homo sapiens
actccatttatccaacyccagcagtatcactga

SEQ ID NO: 1415 - DNA, 33 bp, Homo sapiens
actctattccattggaracaaacctaggttgta

SEQ ID NO: 1416 - DNA, 33 bp, Homo sapiens
actgagtcccaatgggyaactgattgcctcttt

SEQ ID NO: 1417 - DNA, 33 bp, Homo sapiens
actgcaaatacatttamaggaaggaagaatatt

SEQ ID NO: 1418 - DNA, 33 bp, Homo sapiens
acttcttggactatggratcattagaagcccaa

SEQ ID NO: 1419 - DNA, 33 bp, Homo sapiens
acttgaaatgtgctacygatttgttattaattt

SEQ ID NO: 1420 - DNA, 33 bp, Homo sapiens
agaagagtacaccatgycagtagtcatcaaaaa

SEQ ID NO: 1421 - DNA, 33 bp, Homo sapiens
agaatctttcttgctcratgtcttctcactgtc

SEQ ID NO: 1422 - DNA, 33 bp, Homo sapiens
agacagtaatttgaacyggatgaactgaaagga

SEQ ID NO: 1423 - DNA, 33 bp, Homo sapiens
agactaatgtaggtgakaactaggatcccttcc

SEQ ID NO: 1424 - DNA, 33 bp, Homo sapiens
agactctttttccacgraacatcttacaggcta

SEQ ID NO: 1425 - DNA, 33 bp, Homo sapiens
agacttcaagagatcamgaagcctgcccagagt

SEQ ID NO: 1426 - DNA, 33 bp, Homo sapiens
agaggcaagggcaacaytgaaacagaccaatgc

SEQ ID NO: 1427 - DNA, 33 bp, Homo sapiens
agaggcagggcatccarggaagaagctattatg

SEQ ID NO: 1428 - DNA, 33 bp, Homo sapiens
gtgggacagctgtttgyacttagcagttaagtg

SEQ ID NO: 1429 - DNA, 33 bp, Homo sapiens
agagtatgtaactaacracgggagaaactggga

SEQ ID NO: 1430 - DNA, 33 bp, Homo sapiens
agagtttataacctacygacaaaagagcccctt

SEQ ID NO: 1431 - DNA, 33 bp, Homo sapiens
agataaaattaccatcraaaattagctgagaga

SEQ ID NO: 1432 - DNA, 33 bp, Homo sapiens
agatcttttaagcgcayacagtgagggttgtaa

SEQ ID NO: 1433 - DNA, 33 bp, Homo sapiens
agatgaagtaataatakatcagggtagtcctaa

SEQ ID NO: 1434 - DNA, 33 bp, Homo sapiens
agatgtcagtgggaagraagcttagagatctca

SEQ ID NO: 1435 - DNA, 33 bp, Homo sapiens
agattcacaaataaaargttgcagttcttattt

SEQ ID NO: 1436 - DNA, 33 bp, Homo sapiens
agcaaccattcctgcarggtttttttggttatt

SEQ ID NO: 1437 - DNA, 33 bp, Homo sapiens
agcactctcatttacartggccacacaaaggag

SEQ ID NO: 1438 - DNA, 33 bp, Homo sapiens
agcactttgctcttcckcaccaatgcagtacag

SEQ ID NO: 1439 - DNA, 33 bp, Homo sapiens
agcagaccaagtggaamtgattaaccaatctta

SEQ ID NO: 1440 - DNA, 33 bp, Homo sapiens
agcatcatgtgactcaygaaaattgaatcaaaa

SEQ ID NO: 1441 - DNA, 33 bp, Homo sapiens
agccaccgcgccccgamaagaattctctggagt

SEQ ID NO: 1442 - DNA, 33 bp, Homo sapiens
agcctcagagctgaaayggctgttatgcaccac

SEQ ID NO: 1443 - DNA, 33 bp, Homo sapiens
agccttcaagattcggracacaataaggatgcc

SEQ ID NO: 1444 - DNA, 33 bp, Homo sapiens
agctgctgtgagagccratcatgtatctcatgt

SEQ ID NO: 1445 - DNA, 33 bp, Homo sapiens
agcttcttgtgtaagartcctgttgaagacttt

SEQ ID NO: 1446 - DNA, 33 bp, Homo sapiens
aggaaatatttgaggargtttgaatatagccct

SEQ ID NO: 1447 - DNA, 33 bp, Homo sapiens
aggaaatggctacaaaytatgattctagaacag

SEQ ID NO: 1448 - DNA, 33 bp, Homo sapiens
aggaagactttattcarggccgttacaataggg

SEQ ID NO: 1449 - DNA, 33 bp, Homo sapiens
aggataaagaatgactyaaactctggaatgtca

SEQ ID NO: 1450 - DNA, 33 bp, Homo sapiens
aggcagcctttggcaawcactacacactttctt

SEQ ID NO: 1451 - DNA, 33 bp, Homo sapiens
aggctgtggatccatgyatctttgcactcttgg

SEQ ID NO: 1452 - DNA, 33 bp, Homo sapiens
agggctgattatgttcyaccaagtcactatgga

SEQ ID NO: 1453 - DNA, 33 bp, Homo sapiens
aggtttgcttactgtayggaaacgcaaacaaat

SEQ ID NO: 1454 - DNA, 33 bp, Homo sapiens
agtaagctttttagatsaatttattatggatga

SEQ ID NO: 1455 - DNA, 33 bp, Homo sapiens
agtagcttacgaaacartatgagagctatgcaa

SEQ ID NO: 1456 - DNA, 33 bp, Homo sapiens
agtatctataatcagaygtgtacctacgtaact

SEQ ID NO: 1457 - DNA, 33 bp, Homo sapiens
tctctggattgtctcargtctttccatgtactt

SEQ ID NO: 1458 - DNA, 33 bp, Homo sapiens
agtgatcagtaatctayagaaaacttgaggggt

SEQ ID NO: 1459 - DNA, 33 bp, Homo sapiens
agttcgtccttcaaaamgcatttgcaggaccta

SEQ ID NO: 1460 - DNA, 33 bp, Homo sapiens
agttctgggtaatacaycttgaactggtggaaa

SEQ ID NO: 1461 - DNA, 33 bp, Homo sapiens
agttcttcattagtatwagctgaaataatgggg

SEQ ID NO: 1462 - DNA, 33 bp, Homo sapiens
agttgcttatcacagaygacacccacactctgg

SEQ ID NO: 1463 - DNA, 33 bp, Homo sapiens
ataaaaggcccttctcratagccacacagctac

SEQ ID NO: 1464 - DNA, 33 bp, Homo sapiens
ataaaataggtctgaargtacttcccatcatag

SEQ ID NO: 1465 - DNA, 33 bp, Homo sapiens
ataaccaaatttgggaytatattggagaggtct

SEQ ID NO: 1466 - DNA, 33 bp, Homo sapiens
atacagtacacattacmatttgcgtctaatgcc

SEQ ID NO: 1467 - DNA, 33 bp, Homo sapiens
atacagtgtatatttcrattctatggctaaagt

SEQ ID NO: 1468 - DNA, 33 bp, Homo sapiens
atactcctgtagcaacyggaccagaaaaaacca

SEQ ID NO: 1469 - DNA, 33 bp, Homo sapiens
atactttgtgcctaacyataaatacaaaaatta

SEQ ID NO: 1470 - DNA, 33 bp, Homo sapiens
atagatttccagatacygcgaggttattcctgt

SEQ ID NO: 1471 - DNA, 33 bp, Homo sapiens
atataatggaatttggmaaaagatgtctcaaac

SEQ ID NO: 1472 - DNA, 33 bp, Homo sapiens
atatcacaggtgccaaraactaagcatgtccaa

SEQ ID NO: 1473 - DNA, 33 bp, Homo sapiens
atatctaagacatctgyatagaaatgttgtgta

SEQ ID NO: 1474 - DNA, 33 bp, Homo sapiens
atatgttattctctccmggaattgaatttactc

SEQ ID NO: 1475 - DNA, 33 bp, Homo sapiens
atatgttgaaaactggraaatggctttctcttc

SEQ ID NO: 1476 - DNA, 33 bp, Homo sapiens
atatttcagctccacartgaaatcattttatcc

SEQ ID NO: 1477 - DNA, 33 bp, Homo sapiens
atcaaaagagagtggcraattagttggggagaa

SEQ ID NO: 1478 - DNA, 33 bp, Homo sapiens
atcaatcagtagaaaartcattcttggcctatt

SEQ ID NO: 1479 - DNA, 33 bp, Homo sapiens
atcacactgtggcatayagtttccttaggacaa

SEQ ID NO: 1480 - DNA, 33 bp, Homo sapiens
atcacatccaaaataaygattacagtaaggatg

SEQ ID NO: 1481 - DNA, 33 bp, Homo sapiens
atcattacagttcaacrgtatcactgactagat

SEQ ID NO: 1482 - DNA, 33 bp, Homo sapiens
atcattccatcagaccmgcattttctcggttat

SEQ ID NO: 1483 - DNA, 33 bp, Homo sapiens
atcctcggataagctcrctgcccattagaggaa

SEQ ID NO: 1484 - DNA, 33 bp, Homo sapiens
atctagtcccagaaaakgtttccaggaagattt

SEQ ID NO: 1485 - DNA, 33 bp, Homo sapiens
atctatattctcttcayagtgattccttgaggg

SEQ ID NO: 1486 - DNA, 33 bp, Homo sapiens
atgaagtcttgaccaawggtacacactcaggca

SEQ ID NO: 1487 - DNA, 33 bp, Homo sapiens
atgacacattttacaawcactatcaatggtgat

SEQ ID NO: 1488 - DNA, 33 bp, Homo sapiens
atgagactgatgagctracaaaagtaggcttca

SEQ ID NO: 1489 - DNA, 33 bp, Homo sapiens
atgcatcactgttctcyacgtggtccaagtgcc

SEQ ID NO: 1490 - DNA, 33 bp, Homo sapiens
atgctgagatgttcgayctttacccgagggaaa

SEQ ID NO: 1491 - DNA, 33 bp, Homo sapiens
atggatctaagaagaawggtcgatttttcagct

SEQ ID NO: 1492 - DNA, 33 bp, Homo sapiens
atggcatctaaggacayaagttgctacggagta

SEQ ID NO: 1493 - DNA, 33 bp, Homo sapiens
atgtagttggcagtcascccatagaagtgatgt

SEQ ID NO: 1494 - DNA, 33 bp, Homo sapiens
atgtgcagttcataacmgcgttcatgatcctgt

SEQ ID NO: 1495 - DNA, 33 bp, Homo sapiens
atgtgctctggagccasgcaaatctgcttcaaa

SEQ ID NO: 1496 - DNA, 33 bp, Homo sapiens
atgtgtcacgctaccaygtagaaatttacaaat

SEQ ID NO: 1497 - DNA, 33 bp, Homo sapiens
attaccccaatcacaamatgatttatctgaggt

SEQ ID NO: 1498 - DNA, 33 bp, Homo sapiens
attaggatttagctacrgaaaatggctatgaga

SEQ ID NO: 1499 - DNA, 33 bp, Homo sapiens
attccccttctggttgragatttagtgatcagt

SEQ ID NO: 1500 - DNA, 33 bp, Homo sapiens
attctcttgctctgggmacactagtgggcattt

SEQ ID NO: 1501 - DNA, 33 bp, Homo sapiens
attctgtttatatgtcragccacatttattgat

SEQ ID NO: 1502 - DNA, 33 bp, Homo sapiens
attctgtttgaagttaygggatatccactgtgt

SEQ ID NO: 1503 - DNA, 33 bp, Homo sapiens
attgcttgacctttacraagtctactgactaga

SEQ ID NO: 1504 - DNA, 33 bp, Homo sapiens
tggaactgttccctgartaacactttgtacttg

SEQ ID NO: 1505 - DNA, 33 bp, Homo sapiens
attggggtacacaaaaytcacaaatattatctc

SEQ ID NO: 1506 - DNA, 33 bp, Homo sapiens
tgtaaaaatcttttgcygagagggactgcagat

SEQ ID NO: 1507 - DNA, 33 bp, Homo sapiens
atttagtaagtggccamgtgattattgagagac

SEQ ID NO: 1508 - DNA, 33 bp, Homo sapiens
atttgactggttaataycatggaggcagcactg

SEQ ID NO: 1509 - DNA, 33 bp, Homo sapiens
attttcatccagaggckcctgaaacagccaccg

SEQ ID NO: 1510 - DNA, 33 bp, Homo sapiens
caaaatcagtatgtcakcactattttggtggtt

SEQ ID NO: 1511 - DNA, 33 bp, Homo sapiens
caacaccacgtgcaaaraccgatgcagacttgt

SEQ ID NO: 1512 - DNA, 33 bp, Homo sapiens
caacttacagatatacratagacatgaataacc

SEQ ID NO: 1513 - DNA, 33 bp, Homo sapiens
caacttgacataaaagyaatagcttggaaagta

SEQ ID NO: 1514 - DNA, 33 bp, Homo sapiens
caagacaaaaagtgaasatgtcaacacagatgc

SEQ ID NO: 1515 - DNA, 33 bp, Homo sapiens
caagatacatatctgarctatcaccataaagct

SEQ ID NO: 1516 - DNA, 33 bp, Homo sapiens
caagtttatatatcaargtaaccatcacatcca

SEQ ID NO: 1517 - DNA, 33 bp, Homo sapiens
caatactgaggaaatayggttagttttcaaaag

SEQ ID NO: 1518 - DNA, 33 bp, Homo sapiens
caatcatgtatcctgcyacttgggatgccagca

SEQ ID NO: 1519 - DNA, 33 bp, Homo sapiens
caatccagaaggtatakgtacaatcaaataatg

SEQ ID NO: 1520 - DNA, 33 bp, Homo sapiens
caatggcctttgaaaasgaaattgctgctacat

SEQ ID NO: 1521 - DNA, 33 bp, Homo sapiens
cacaagtaggaacttawatgatcaggacttttt

SEQ ID NO: 1522 - DNA, 33 bp, Homo sapiens
cacagccttttgtacayagcttttatgtggcaa

SEQ ID NO: 1523 - DNA, 33 bp, Homo sapiens
cacatcattactgaaayggttgtagaatgttcc

SEQ ID NO: 1524 - DNA, 33 bp, Homo sapiens
cgcagagatcacaaaaygtgtcccgcagaaggg

SEQ ID NO: 1525 - DNA, 33 bp, Homo sapiens
cacattttaaggtcaawtcgtcccttcaatgcc

SEQ ID NO: 1526 - DNA, 33 bp, Homo sapiens
caccacaccacacagtkaaggaattggttctgc

SEQ ID NO: 1527 - DNA, 33 bp, Homo sapiens
cacccctaaccacatastagagttagacaggtc

SEQ ID NO: 1528 - DNA, 33 bp, Homo sapiens
cacctatttgtctctawatgtggtctttcagtc

SEQ ID NO: 1529 - DNA, 33 bp, Homo sapiens
cacgagacgacttcagraagtaagtagggaaag

SEQ ID NO: 1530 - DNA, 33 bp, Homo sapiens
cacggccccccgatgcraacattgccaggccct

SEQ ID NO: 1531 - DNA, 33 bp, Homo sapiens
cacttctccacagttakgcccaaaacagattcc

SEQ ID NO: 1532 - DNA, 33 bp, Homo sapiens
cagagcagacagctccrgagaagaggaactcaa

SEQ ID NO: 1533 - DNA, 33 bp, Homo sapiens
cagatggtcacttcatyagcataaacactaagc

SEQ ID NO: 1534 - DNA, 33 bp, Homo sapiens
cagcaattgaattgccmccaatttttacaacaa

SEQ ID NO: 1535 - DNA, 33 bp, Homo sapiens
cagcctctctgcctcaytcctcataactactcc

SEQ ID NO: 1536 - DNA, 33 bp, Homo sapiens
cagctaaaataggagayaaggggctgtggactc

SEQ ID NO: 1537 - DNA, 33 bp, Homo sapiens
cagctgtgttattctaygcatgtaagtccctat

SEQ ID NO: 1538 - DNA, 33 bp, Homo sapiens
caggaacagttatcaaytcatccctgtctcctc

SEQ ID NO: 1539 - DNA, 33 bp, Homo sapiens
caggaactgccttttaygtctgcaaataaactc

SEQ ID NO: 1540 - DNA, 33 bp, Homo sapiens
caggatattggacacawctgaagagtaaattca

SEQ ID NO: 1541 - DNA, 33 bp, Homo sapiens
cagggcagtcctgcttsaaatcttagcataaat

SEQ ID NO: 1542 - DNA, 33 bp, Homo sapiens
cagtcagaagagctagwcaaacactttcttaga

SEQ ID NO: 1543 - DNA, 33 bp, Homo sapiens
catatgtaggacagaarggctgtatcatgagat

SEQ ID NO: 1544 - DNA, 33 bp, Homo sapiens
catcaactcaccaggakagtgagcactaagaac

SEQ ID NO: 1545 - DNA, 33 bp, Homo sapiens
catcaattatgaaaacrattacaacatcaggaa

SEQ ID NO: 1546 - DNA, 33 bp, Homo sapiens
catcagaggtctcaaayggaccgcctgcagacc

SEQ ID NO: 1547 - DNA, 33 bp, Homo sapiens
catctagttcttcacaygccaaatgagcagctg

SEQ ID NO: 1548 - DNA, 33 bp, Homo sapiens
catctctgtacctatcrctctttaatggaaagc

SEQ ID NO: 1549 - DNA, 33 bp, Homo sapiens
catcttccaacatttakaaggttcaccttgatg

SEQ ID NO: 1550 - DNA, 33 bp, Homo sapiens
catgaaattttgcttcrctgtctccactttcag

SEQ ID NO: 1551 - DNA, 33 bp, Homo sapiens
catgattgaataaatcrctggccattactgact

SEQ ID NO: 1552 - DNA, 33 bp, Homo sapiens
catgcaatggcaataaygtgtggtgagaactca

SEQ ID NO: 1553 - DNA, 33 bp, Homo sapiens
catgctttcactctagraactttgatccagtgt

SEQ ID NO: 1554 - DNA, 33 bp, Homo sapiens
cattttataggtaaggrccacaagtctcagaag

SEQ ID NO: 1555 - DNA, 33 bp, Homo sapiens
ccaacctatccccacargtgagtaattagtgct

SEQ ID NO: 1556 - DNA, 33 bp, Homo sapiens
ccaagagcacatctgcmagaagtcatgtcaatg

SEQ ID NO: 1557 - DNA, 33 bp, Homo sapiens
ccaccaaggtaactgcratacattcattaaagg

SEQ ID NO: 1558 - DNA, 33 bp, Homo sapiens
ccaccttttctttcacwgatatcatgaagtagg

SEQ ID NO: 1559 - DNA, 33 bp, Homo sapiens
ccactctatgtgctcarccttctgtttttacac

SEQ ID NO: 1560 - DNA, 33 bp, Homo sapiens
ccagagatgattagtasaaggctgagtaggtgg

SEQ ID NO: 1561 - DNA, 33 bp, Homo sapiens
ccatcagccttatcaastgagatccataagtga

SEQ ID NO: 1562 - DNA, 33 bp, Homo sapiens
ccatgcccgacaatcakacacttttacatcacc

SEQ ID NO: 1563 - DNA, 33 bp, Homo sapiens
ccattctcatcttattsaaattactggcacatg

SEQ ID NO: 1564 - DNA, 33 bp, Homo sapiens
cccaaagtggctgaaasacagagagccaatagg

SEQ ID NO: 1565 - DNA, 33 bp, Homo sapiens
cccaacaaatctgtaarcaccctagaagtatga

SEQ ID NO: 1566 - DNA, 33 bp, Homo sapiens
cccaacttggagataamcattgttaaatatgaa

SEQ ID NO: 1567 - DNA, 33 bp, Homo sapiens
cccagatcatatttcawgtccagtaacacagga

SEQ ID NO: 1568 - DNA, 33 bp, Homo sapiens
ccccaaagacaacctasatgagtgaagagccaa

SEQ ID NO: 1569 - DNA, 33 bp, Homo sapiens
cccctcacaactccacraagaacgtagtccagg

SEQ ID NO: 1570 - DNA, 33 bp, Homo sapiens
cccgtccttgagatcgracctgtctttggggat

SEQ ID NO: 1571 - DNA, 33 bp, Homo sapiens
ccctactcacgtcaccwataaagacatacattg

SEQ ID NO: 1572 - DNA, 33 bp, Homo sapiens
cccttcattgcttatcraaaccttttaggtaat

SEQ ID NO: 1573 - DNA, 33 bp, Homo sapiens
ccgcccaggagcgcgcraaaccttctccacacc

SEQ ID NO: 1574 - DNA, 33 bp, Homo sapiens
ccgtttactgtgttgayagattttgtttttggt

SEQ ID NO: 1575 - DNA, 33 bp, Homo sapiens
cctacgcctctccaaakttaaggaaaatgtgac

SEQ ID NO: 1576 - DNA, 33 bp, Homo sapiens
cctagagacgactgagwaacctaaagaagaaac

SEQ ID NO: 1577 - DNA, 33 bp, Homo sapiens
cctagtggctgatagawgatttagccctataat

SEQ ID NO: 1578 - DNA, 33 bp, Homo sapiens
cctataggaaacaccartagtgacctacacagc

SEQ ID NO: 1579 - DNA, 33 bp, Homo sapiens
cctcatcagtggtgagyccatcaaccttggatt

SEQ ID NO: 1580 - DNA, 33 bp, Homo sapiens
cctgccacaggagccayagcagtacctacccta

SEQ ID NO: 1581 - DNA, 33 bp, Homo sapiens
cctgggaaagtattgayggctttcatgaggaag

SEQ ID NO: 1582 - DNA, 33 bp, Homo sapiens
cctggtgggaactctcycctcttcgccaagtcg

SEQ ID NO: 1583 - DNA, 33 bp, Homo sapiens
cctgtgtcaatatatarctttctctttatgcat

SEQ ID NO: 1584 - DNA, 33 bp, Homo sapiens
cctgttctggatcccaytccatcttacttctta

SEQ ID NO: 1585 - DNA, 33 bp, Homo sapiens
cctgttgcctttcagamggagttaatggatagc

SEQ ID NO: 1586 - DNA, 33 bp, Homo sapiens
cctgtttccttacagayctttctggcagcactt

SEQ ID NO: 1587 - DNA, 33 bp, Homo sapiens
cgcattaaagtacatcmccttaactcacttctg

SEQ ID NO: 1588 - DNA, 33 bp, Homo sapiens
cgcctaggacagacctkaaatttatagacctgt

SEQ ID NO: 1589 - DNA, 33 bp, Homo sapiens
cgtgggtataaccggaygaaacctgtgtgtgca

SEQ ID NO: 1590 - DNA, 33 bp, Homo sapiens
ctaaatattaagcaagyagtagaagcaaggaat

SEQ ID NO: 1591 - DNA, 33 bp, Homo sapiens
ctaacattttgtcctaratcttcctgaacctgg

SEQ ID NO: 1592 - DNA, 33 bp, Homo sapiens
ctacatcatccacatartatcagtaaaaatgat

SEQ ID NO: 1593 - DNA, 33 bp, Homo sapiens
ctactgaagtctttgartaattacgtatcagga

SEQ ID NO: 1594 - DNA, 33 bp, Homo sapiens
ctagtaaatacaaaaakgacctaatgcttaaca

SEQ ID NO: 1595 - DNA, 33 bp, Homo sapiens
ctagtcggctttttcaygattgcaaatctgaag

SEQ ID NO: 1596 - DNA, 33 bp, Homo sapiens
ctatctcaattcttccyacgtttgttatgcata

SEQ ID NO: 1597 - DNA, 33 bp, Homo sapiens
ctatgatttctagccakctagggacttcagaat

SEQ ID NO: 1598 - DNA, 33 bp, Homo sapiens
ctattttcagcacatargaagtatcctgtcttt

SEQ ID NO: 1599 - DNA, 33 bp, Homo sapiens
ctcagctcttacagaawtacataacagtgcttg

SEQ ID NO: 1600 - DNA, 33 bp, Homo sapiens
ctcataccagatcttakgtaaaaggatttgagt

SEQ ID NO: 1601 - DNA, 33 bp, Homo sapiens
ctcattcttggcaaagkcttcctttcttggtgc

SEQ ID NO: 1602 - DNA, 33 bp, Homo sapiens
ctccacataagtttaayctcaaatcagctttgt

SEQ ID NO: 1603 - DNA, 33 bp, Homo sapiens
ctcctcttataccacartaatgaccaggcacac

SEQ ID NO: 1604 - DNA, 33 bp, Homo sapiens
ctcctctttttaacctraacttcattgcctgat

SEQ ID NO: 1605 - DNA, 33 bp, Homo sapiens
ctcctttcatgtgtgaygacttctctcacttct

SEQ ID NO: 1606 - DNA, 33 bp, Homo sapiens
ctctcaccttataaagragcgacagaaagaatg

SEQ ID NO: 1607 - DNA, 33 bp, Homo sapiens
ctctcttctccctatcraccttcttctcagcca

SEQ ID NO: 1608 - DNA, 33 bp, Homo sapiens
ctctgcctctcagagayagtgatggcagagaca

SEQ ID NO: 1609 - DNA, 33 bp, Homo sapiens
ctcttgagagtgaagamcagttcttttcaaatc

SEQ ID NO: 1610 - DNA, 33 bp, Homo sapiens
ctgaacaaaagtggacrgcaataattagattct

SEQ ID NO: 1611 - DNA, 33 bp, Homo sapiens
ctgaacctcctgaaacrgagagctgaaacagag

SEQ ID NO: 1612 - DNA, 33 bp, Homo sapiens
ctgaagtccttgctgcyagttcaaacttgttca

SEQ ID NO: 1613 - DNA, 33 bp, Homo sapiens
ctgagggctttgagccrgaacctgcaaccaaca

SEQ ID NO: 1614 - DNA, 33 bp, Homo sapiens
ctgagggtcagttagcrgaatagttctttctca

SEQ ID NO: 1615 - DNA, 33 bp, Homo sapiens
ctgagtatctaaccatraaactagaggtggagt

SEQ ID NO: 1616 - DNA, 33 bp, Homo sapiens
ctgccatgagttatgaytaaccgagaaaaatgt

SEQ ID NO: 1617 - DNA, 33 bp, Homo sapiens
ctgcccaaagaagtgaygatgtgagatgattat

SEQ ID NO: 1618 - DNA, 33 bp, Homo sapiens
ctgctaattccttaagrctcaactctgacatca

SEQ ID NO: 1619 - DNA, 33 bp, Homo sapiens
ctgctttttttcgacarctaaatagtactccat

SEQ ID NO: 1620 - DNA, 33 bp, Homo sapiens
ctgtcatctggactccrcaaataatattctagt

SEQ ID NO: 1621 - DNA, 33 bp, Homo sapiens
ctgtcttttgtacacayagctttatgactgcca

SEQ ID NO: 1622 - DNA, 33 bp, Homo sapiens
ctgtgctcagcttcagwatcagcccagggagat

SEQ ID NO: 1623 - DNA, 33 bp, Homo sapiens
cttaattatgtcgaggyccaacaacacatggta

SEQ ID NO: 1624 - DNA, 33 bp, Homo sapiens
cttaattttcaatatcracttgactgaattaag

SEQ ID NO: 1625 - DNA, 33 bp, Homo sapiens
cttaccaacagcagaasttagcagggggaggct

SEQ ID NO: 1626 - DNA, 33 bp, Homo sapiens
cttagctctttgcttayggtgttgccaaattcc

SEQ ID NO: 1627 - DNA, 33 bp, Homo sapiens
cttagtttctggatagyccatgatatagcagtc

SEQ ID NO: 1628 - DNA, 33 bp, Homo sapiens
cttatgaagttcaaaartgagtaaaactaacac

SEQ ID NO: 1629 - DNA, 33 bp, Homo sapiens
cttattggtcttgacarattctgatgtgattac

SEQ ID NO: 1630 - DNA, 33 bp, Homo sapiens
cttattttgcttaataygtcaaggttcatccat

SEQ ID NO: 1631 - DNA, 33 bp, Homo sapiens
cttcacgccttgcacaytggaaaactgtcatga

SEQ ID NO: 1632 - DNA, 33 bp, Homo sapiens
cttctgatttccccgaktcctaatgaagttgaa

SEQ ID NO: 1633 - DNA, 33 bp, Homo sapiens
cttgaagaagataaaarggcaaaccacaagcca

SEQ ID NO: 1634 - DNA, 33 bp, Homo sapiens
cttgctccctatgtcaytactcctcacccttcc

SEQ ID NO: 1635 - DNA, 33 bp, Homo sapiens
cttggaactgtctccaygagtcataaccatact

SEQ ID NO: 1636 - DNA, 33 bp, Homo sapiens
cttgttctgctcacaamaaatcatctttccttg

SEQ ID NO: 1637 - DNA, 33 bp, Homo sapiens
ctttcatagtcagacarggctctgttccaggga

SEQ ID NO: 1638 - DNA, 33 bp, Homo sapiens
ctttgtgcgagcgcagrcatccccattccatgc

SEQ ID NO: 1639 - DNA, 33 bp, Homo sapiens
ctttgttctctgatgcraaaaatcttcagaaac

SEQ ID NO: 1640 - DNA, 33 bp, Homo sapiens
ctttttcctgctaagamggcactgttggaagga

SEQ ID NO: 1641 - DNA, 33 bp, Homo sapiens
gaaaacaaatagataaycgcctgcctgaacttt

SEQ ID NO: 1642 - DNA, 33 bp, Homo sapiens
gaaaatatttgaggatraatgtctaaatgcaag

SEQ ID NO: 1643 - DNA, 33 bp, Homo sapiens
gaaaccattgtatcagraactgaaaggagatca

SEQ ID NO: 1644 - DNA, 33 bp, Homo sapiens
gaaagtagggaaactcratcttagtttataatt

SEQ ID NO: 1645 - DNA, 33 bp, Homo sapiens
gaaatgtgccagtagarctttatgggtgaaaaa

SEQ ID NO: 1646 - DNA, 33 bp, Homo sapiens
gaacactaagattatgraagttagaacaacgct

SEQ ID NO: 1647 - DNA, 33 bp, Homo sapiens
gaagagcaaatgcaaasaccaagagttgggcac

SEQ ID NO: 1648 - DNA, 33 bp, Homo sapiens
gaagaggcttctgttcsaagattggagatgcta

SEQ ID NO: 1649 - DNA, 33 bp, Homo sapiens
gaagcaacttagtttcycaatgaaagctgtaac

SEQ ID NO: 1650 - DNA, 33 bp, Homo sapiens
gaatgaaactagaaatkaatggcagacagaaaa

SEQ ID NO: 1651 - DNA, 33 bp, Homo sapiens
gaatgaactcaaaatasattgtggacttatatg

SEQ ID NO: 1652 - DNA, 33 bp, Homo sapiens
gaattgcatgccaggayagtgttgatgaaccaa

SEQ ID NO: 1653 - DNA, 33 bp, Homo sapiens
gacaagggaaagttccmagaagagtgatacctc

SEQ ID NO: 1654 - DNA, 33 bp, Homo sapiens
gacactagacattgggwatgaacagacatcagg

SEQ ID NO: 1655 - DNA, 33 bp, Homo sapiens
gacatctgaaaggcgaygttgctgcctccccag

SEQ ID NO: 1656 - DNA, 33 bp, Homo sapiens
gacatgcgtgactgtcragcaataaccatcact

SEQ ID NO: 1657 - DNA, 33 bp, Homo sapiens
gaccacgggctttgagkaaacattggcagtagc

SEQ ID NO: 1658 - DNA, 33 bp, Homo sapiens
gacccctttggtgagasaatggtcttgaaagta

SEQ ID NO: 1659 - DNA, 33 bp, Homo sapiens
gacggcagactacatamcctgaaggacttcacc

SEQ ID NO: 1660 - DNA, 33 bp, Homo sapiens
gtgagcattcagactcratagtgctgttctgta

SEQ ID NO: 1661 - DNA, 33 bp, Homo sapiens
tgcaactaagaggagarccaatggagcaacact

SEQ ID NO: 1662 - DNA, 33 bp, Homo sapiens
gactgatttctcttgcyaatcattaatatccaa

SEQ ID NO: 1663 - DNA, 33 bp, Homo sapiens
gactgcctgcacccaastccttatctctcaatc

SEQ ID NO: 1664 - DNA, 33 bp, Homo sapiens
gagaacatttagctcargtctaatagcagttat

SEQ ID NO: 1665 - DNA, 33 bp, Homo sapiens
gagaccataaagtctayaggttggagtgttgtt

SEQ ID NO: 1666 - DNA, 33 bp, Homo sapiens
gagacccttagtggaargaagacttgccaaagt

SEQ ID NO: 1667 - DNA, 33 bp, Homo sapiens
gagagtggatagaagcrctaggctgtggctttc

SEQ ID NO: 1668 - DNA, 33 bp, Homo sapiens
gagattctgtatttaaygaaaactgccgagagc

SEQ ID NO: 1669 - DNA, 33 bp, Homo sapiens
gagcagaactattaaayaacaaggtctatatgg

SEQ ID NO: 1670 - DNA, 33 bp, Homo sapiens
gagcataggctgaggaraaggaaccagccccac

SEQ ID NO: 1671 - DNA, 33 bp, Homo sapiens
cctcctgttgtagctayggactaccttaaggag

SEQ ID NO: 1672 - DNA, 33 bp, Homo sapiens
gaggaaaaaaacggtaygtatgcgtattcagat

SEQ ID NO: 1673 - DNA, 33 bp, Homo sapiens
gaggatacagcaagaasgtgtttgtctacaagc

SEQ ID NO: 1674 - DNA, 33 bp, Homo sapiens
gagggctggcattcaamgacttcttcgagtgtt

SEQ ID NO: 1675 - DNA, 33 bp, Homo sapiens
gagggtagagtttaaawcattgtgatacaaatg

SEQ ID NO: 1676 - DNA, 33 bp, Homo sapiens
gaggtagagaaggaccraagtgattacccaggc

SEQ ID NO: 1677 - DNA, 33 bp, Homo sapiens
gagtaaaagacccagargagagtttggtgccta

SEQ ID NO: 1678 - DNA, 33 bp, Homo sapiens
gagtgatccttgccatratagaatgttctggtt

SEQ ID NO: 1679 - DNA, 33 bp, Homo sapiens
gataaatgactcgtgayattaatctgaagtaaa

SEQ ID NO: 1680 - DNA, 33 bp, Homo sapiens
gatgctaatgtaaccaygcataatgcttgcttc

SEQ ID NO: 1681 - DNA, 33 bp, Homo sapiens
gatggagcatgaagackgagaagagagttaagg

SEQ ID NO: 1682 - DNA, 33 bp, Homo sapiens
gatgttctttagcaaaygaggaacttcacctct

SEQ ID NO: 1683 - DNA, 33 bp, Homo sapiens
gattaccctcacactcyccttgttaaaagctcc

SEQ ID NO: 1684 - DNA, 33 bp, Homo sapiens
gattggtgtttgactgmatagctgggaattcta

SEQ ID NO: 1685 - DNA, 33 bp, Homo sapiens
gatttccaattaccagrcaatatgttatgtgct

SEQ ID NO: 1686 - DNA, 33 bp, Homo sapiens
gcaaatgcttcacaacwgttgtccttggtctaa

SEQ ID NO: 1687 - DNA, 33 bp, Homo sapiens
gcaagtgaaagtgaaayagctgtaatgaaatta

SEQ ID NO: 1688 - DNA, 33 bp, Homo sapiens
gcagcatgcggtccaamgtaataaacagatgtc

SEQ ID NO: 1689 - DNA, 33 bp, Homo sapiens
gcagggatttcatgtaygtgatgagagactcct

SEQ ID NO: 1690 - DNA, 33 bp, Homo sapiens
gcagtaccagcaagacraccaagaagaggcagt

SEQ ID NO: 1691 - DNA, 33 bp, Homo sapiens
gcatcagtccatggagmaattcatgccccagat

SEQ ID NO: 1692 - DNA, 33 bp, Homo sapiens
gcattactacaaccacrcttaaagcacggtgta

SEQ ID NO: 1693 - DNA, 33 bp, Homo sapiens
gccaaaatttgggcgcmgattccaccacttggt

SEQ ID NO: 1694 - DNA, 33 bp, Homo sapiens
gccacgttaaaattccrcactcagccaagcaac

SEQ ID NO: 1695 - DNA, 33 bp, Homo sapiens
gccacttgttggttgarcatgcttctgaagtca

SEQ ID NO: 1696 - DNA, 33 bp, Homo sapiens
gccatagctgttgtaaygttgccatggtgcaac

SEQ ID NO: 1697 - DNA, 33 bp, Homo sapiens
gccatctcatctcatgragacgcaaaatggtgt

SEQ ID NO: 1698 - DNA, 33 bp, Homo sapiens
gcccagggtgccttaastctgcctgtcccttct

SEQ ID NO: 1699 - DNA, 33 bp, Homo sapiens
gccctttggtatcacaraaaacctctaagccct

SEQ ID NO: 1700 - DNA, 33 bp, Homo sapiens
gccgattgccatatatsatacaaagcgggcttg

SEQ ID NO: 1701 - DNA, 33 bp, Homo sapiens
gcctatctatctaacamctctgacaacagaaga

SEQ ID NO: 1702 - DNA, 33 bp, Homo sapiens
gccttgtgctagtaagwacttattgagtgaatg

SEQ ID NO: 1703 - DNA, 33 bp, Homo sapiens
gcgattgttgaaatcakatctactgaaactcat

SEQ ID NO: 1704 - DNA, 33 bp, Homo sapiens
gctagatctctctccartgctttactctgagca

SEQ ID NO: 1705 - DNA, 33 bp, Homo sapiens
gctgcaagtggcttaaygatatgttcctggaag

SEQ ID NO: 1706 - DNA, 33 bp, Homo sapiens
gctgcgatgccaaccawaaacccctccacagta

SEQ ID NO: 1707 - DNA, 33 bp, Homo sapiens
gctggatgcattaacgyaaagtgaatatacctg

SEQ ID NO: 1708 - DNA, 33 bp, Homo sapiens
gcttccaaaagtaggayggtgcctggagcgacc

SEQ ID NO: 1709 - DNA, 33 bp, Homo sapiens
gcttgtttagttatcamtcctcccaaacacaat

SEQ ID NO: 1710 - DNA, 33 bp, Homo sapiens
ggaaaagaagttactayagttttgcatagaaag

SEQ ID NO: 1711 - DNA, 33 bp, Homo sapiens
ggaaagttcagtatcgsattaataaagagaaac

SEQ ID NO: 1712 - DNA, 33 bp, Homo sapiens
ggactgggtagtgacasaggacacatgggggca

SEQ ID NO: 1713 - DNA, 33 bp, Homo sapiens
ggagcagttttctacaytgaagaacatccaaca

SEQ ID NO: 1714 - DNA, 33 bp, Homo sapiens
ggagcgaccagggtacygacaccatcttctcga

SEQ ID NO: 1715 - DNA, 33 bp, Homo sapiens
ggagctgcgactagaasgtggtcggataatgcc

SEQ ID NO: 1716 - DNA, 33 bp, Homo sapiens
ggagctgctaaagtcarataggtgggaaacaca

SEQ ID NO: 1717 - DNA, 33 bp, Homo sapiens
gggaaagcagtagtaaygtctcatagatgtgcc

SEQ ID NO: 1718 - DNA, 33 bp, Homo sapiens
ggtagtttgctggctargagcaataaaggtgac

SEQ ID NO: 1719 - DNA, 33 bp, Homo sapiens
gtggaaatatttgaaarcattatccaagtacat

SEQ ID NO: 1720 - DNA, 33 bp, Homo sapiens
gttctcttttgtgcaamattcccaaatctgatt

SEQ ID NO: 1721 - DNA, 33 bp, Homo sapiens
taaaacaattcaatagwacagcaaacattaaaa

SEQ ID NO: 1722 - DNA, 33 bp, Homo sapiens
taaagaagatcgacatraattattccataaaat

SEQ ID NO: 1723 - DNA, 33 bp, Homo sapiens
taacagtatataaaggyaaggtctggaattaga

SEQ ID NO: 1724 - DNA, 33 bp, Homo sapiens
taaccacacaaacaaaygtgacattattacatg

SEQ ID NO: 1725 - DNA, 33 bp, Homo sapiens
taatcatggcctctgcratattctgaactccta

SEQ ID NO: 1726 - DNA, 33 bp, Homo sapiens
tacctaaatgagacaamtgaaacgcatatacat

SEQ ID NO: 1727 - DNA, 33 bp, Homo sapiens
tacctaacaggctatgraccagaactgggccac

SEQ ID NO: 1728 - DNA, 33 bp, Homo sapiens
tagcctcagggcacagrctgaaccaaaaaacag

SEQ ID NO: 1729 - DNA, 33 bp, Homo sapiens
tagtctataaaatctarcatagtgctttgcatg

SEQ ID NO: 1730 - DNA, 33 bp, Homo sapiens
tataaactaggtgagartccagctgctgagtga

SEQ ID NO: 1731 - DNA, 33 bp, Homo sapiens
tccaccactgctaccaycaagagatcaaaccca

SEQ ID NO: 1732 - DNA, 33 bp, Homo sapiens
tggggcacagatacacygagtaacttgtccaag

SEQ ID NO: 1733 - DNA, 33 bp, Homo sapiens
actgttctgaggttccyactaaatacatttgtt

SEQ ID NO: 1734 - DNA, 33 bp, Homo sapiens
ttataccattctagacrctagtcctttgtcaga

SEQ ID NO: 1735 - DNA, 33 bp, Homo sapiens
ttctctgcctatgtccyaatttaaaacctacac

SEQ ID NO: 1736 - DNA, 33 bp, Homo sapiens
ttgagatgggatgagayaggagttagtagaaac

SEQ ID NO: 1737 - DNA, 33 bp, Homo sapiens
tttatcccaatgagtasagtggagagtatttaa

SEQ ID NO: 1738 - DNA, 33 bp, Homo sapiens
tttatcttctccccaayctcaaactcataaaat

SEQ ID NO: 1739 - DNA, 33 bp, Homo sapiens
ttttaaggtctttcgcygattgaatcagaccca

SEQ ID NO: 1740 - DNA, 33 bp, Homo sapiens
tcttactctcatggackctaaagcaaaatccac

SEQ ID NO: 1741 - DNA, 33 bp, Homo sapiens
aatgaatgagaaatacraaaccagaatatgagg

SEQ ID NO: 1742 - DNA, 33 bp, Homo sapiens
accttccctgtatgaaygactcctcagagtaac

SEQ ID NO: 1743 - DNA, 33 bp, Homo sapiens
tctaaaatagaaagaaygcaaagccttagagag

SEQ ID NO: 1744 - DNA, 33 bp, Homo sapiens
ccctgctttctttctaygccctgaagatgaaac

SEQ ID NO: 1745 - DNA, 33 bp, Homo sapiens
ttaagagccatgaatargtatctcattaccttt

SEQ ID NO: 1746 - DNA, 33 bp, Homo sapiens
caaaattctaaaatatwagagtgcagttgtcat

SEQ ID NO: 1747 - DNA, 33 bp, Homo sapiens
agtgtactgctgatgaygagaaggaactaagga

SEQ ID NO: 1748 - DNA, 33 bp, Homo sapiens
ttttctatggtttgaastcttggtaattacctc

SEQ ID NO: 1749 - DNA, 33 bp, Homo sapiens
tactgcttctcataacygtgtgcatgaggtgat

SEQ ID NO: 1750 - DNA, 33 bp, Homo sapiens
agcaggtcagtatctgwcaaaattctcaaggaa

SEQ ID NO: 1751 - DNA, 33 bp, Homo sapiens
tctgtgctctcaataaycctatattcttgtgcg

SEQ ID NO: 1752 - DNA, 33 bp, Homo sapiens
agaagataactgcatawagagagagaactctgg

SEQ ID NO: 1753 - DNA, 33 bp, Homo sapiens
ttgtcttgtattagtgraggctgcaatcagtga

SEQ ID NO: 1754 - DNA, 33 bp, Homo sapiens
gctagaaccttcaaacragctttcaaaataatg

SEQ ID NO: 1755 - DNA, 33 bp, Homo sapiens
actgtgcttgttccacrcttgcctacagtggtt

SEQ ID NO: 1756 - DNA, 33 bp, Homo sapiens
tgggaatgtaaaagggwaggcactccggaagag

SEQ ID NO: 1757 - DNA, 33 bp, Homo sapiens
aatcactcgaattaaaygaatctcttctataca

SEQ ID NO: 1758 - DNA, 33 bp, Homo sapiens
ttgagtgttggaaccayctttgtacttatccat

SEQ ID NO: 1759 - DNA, 33 bp, Homo sapiens
tcattctctttaaatastactggtttggaagct

SEQ ID NO: 1760 - DNA, 33 bp, Homo sapiens
aacagaaaattaagatmagattggctaacaaga

SEQ ID NO: 1761 - DNA, 33 bp, Homo sapiens
aaggtcagcactgtcaygtaaggtatgtgctga

SEQ ID NO: 1762 - DNA, 33 bp, Homo sapiens
aatcagtgtagtaatgyatgatgaaaataacat

SEQ ID NO: 1763 - DNA, 33 bp, Homo sapiens
aatggcctttattacayagagaagctttccttc

SEQ ID NO: 1764 - DNA, 33 bp, Homo sapiens
aattattttggcaggcyattttgcacagataat

SEQ ID NO: 1765 - DNA, 33 bp, Homo sapiens
gacaatacattaggtayattttcacaccttact

SEQ ID NO: 1766 - DNA, 33 bp, Homo sapiens
agtgcatttgcaaatcsttggttcacaataagt

SEQ ID NO: 1767 - DNA, 33 bp, Homo sapiens
actctgtacaaacacartcttttttaatatcaa

SEQ ID NO: 1768 - DNA, 33 bp, Homo sapiens
acttaaatgcaccaacrattggagagtagttaa

SEQ ID NO: 1769 - DNA, 33 bp, Homo sapiens
agaaaaggagtttataygtagtgtaattatttc

SEQ ID NO: 1770 - DNA, 33 bp, Homo sapiens
agagacttcatcatcaygctctgctgtctgcac

SEQ ID NO: 1771 - DNA, 33 bp, Homo sapiens
agagcagcagaccaacmagatatgtttttaatg

SEQ ID NO: 1772 - DNA, 33 bp, Homo sapiens
agccttcccaaaagacragacctgtgcactatg

SEQ ID NO: 1773 - DNA, 33 bp, Homo sapiens
aggaagatggacaagartctcactgctgagaat

SEQ ID NO: 1774 - DNA, 33 bp, Homo sapiens
aggacctctaggttagyagagcataaagttgga

SEQ ID NO: 1775 - DNA, 33 bp, Homo sapiens
aggggggaaatgatgaygaaatgtaacgtggga

SEQ ID NO: 1776 - DNA, 33 bp, Homo sapiens
atcgttccagtcttagyatatgtgctgccaaag

SEQ ID NO: 1777 - DNA, 33 bp, Homo sapiens
atgttttaggacctgawaagtgtattatattta

SEQ ID NO: 1778 - DNA, 33 bp, Homo sapiens
attctgttaggacacakcaagttttattaaatt

SEQ ID NO: 1779 - DNA, 33 bp, Homo sapiens
caattccggcactttcyaagaagccaagaattt

SEQ ID NO: 1780 - DNA, 33 bp, Homo sapiens
caggcaggaagtgctargggagaacacaccctg

SEQ ID NO: 1781 - DNA, 33 bp, Homo sapiens
ccaaacttgcaactcayatctgaaattggaagg

SEQ ID NO: 1782 - DNA, 33 bp, Homo sapiens
ccagccctctgtctcayagaaactcttaactca

SEQ ID NO: 1783 - DNA, 33 bp, Homo sapiens
cctaaatgggtcctacrcgtgccctgttaaata

SEQ ID NO: 1784 - DNA, 33 bp, Homo sapiens
cctaggagagggttgawgatggttaaagaatac

SEQ ID NO: 1785 - DNA, 33 bp, Homo sapiens
cgagcttggtttagacyctcattttgtctaaac

SEQ ID NO: 1786 - DNA, 33 bp, Homo sapiens
ggcaatacaacctgatsagaatttatctacctt

SEQ ID NO: 1787 - DNA, 33 bp, Homo sapiens
ctgtgtgttgctgggawcaacatccttagagcg

SEQ ID NO: 1788 - DNA, 33 bp, Homo sapiens
cttagtggtatccacarataatctggcctgggg

SEQ ID NO: 1789 - DNA, 33 bp, Homo sapiens
cttatcctaagtctcaygctccatacaaaaatt

SEQ ID NO: 1790 - DNA, 33 bp, Homo sapiens
cttcactttttccctgwatattgctcttccctt

SEQ ID NO: 1791 - DNA, 33 bp, Homo sapiens
cttgtatggcaccttasagcaacacattgacac

SEQ ID NO: 1792 - DNA, 33 bp, Homo sapiens
gaaggagctgtaccacrgacaagaagaagatgg

SEQ ID NO: 1793 - DNA, 33 bp, Homo sapiens
gaaggcggcctgaacckaatggccaaagaggcc

SEQ ID NO: 1794 - DNA, 33 bp, Homo sapiens
gacattcagtccacggraacaaagacacggact

SEQ ID NO: 1795 - DNA, 33 bp, Homo sapiens
gatttaaaagatgacarcacatttcttactctt

SEQ ID NO: 1796 - DNA, 33 bp, Homo sapiens
gcactccaattgtggawtcattagagaaagaat

SEQ ID NO: 1797 - DNA, 33 bp, Homo sapiens
gcattctcgctgccagyatgggaaggattactc

SEQ ID NO: 1798 - DNA, 33 bp, Homo sapiens
gccacaaggactgcaayatctaggtgagtctta

SEQ ID NO: 1799 - DNA, 33 bp, Homo sapiens
gccatagtcaatgctawgtataaagttagcaaa

SEQ ID NO: 1800 - DNA, 33 bp, Homo sapiens
ggaatgcagattgttamaaatgaatctgtgttt

SEQ ID NO: 1801 - DNA, 33 bp, Homo sapiens
ggcagtagagcacttargagaggggactccaaa

SEQ ID NO: 1802 - DNA, 33 bp, Homo sapiens
ggcctttgagaattgcrgaaggagcccactggg

SEQ ID NO: 1803 - DNA, 33 bp, Homo sapiens
gggtcagctctgtgcakctcagacttcgtctcc

SEQ ID NO: 1804 - DNA, 33 bp, Homo sapiens
ggtgaaactactggatragagagatgagaggcc

SEQ ID NO: 1805 - DNA, 33 bp, Homo sapiens
gtaagtagtttatgaakccctttctgatgatga

SEQ ID NO: 1806 - DNA, 33 bp, Homo sapiens
gtactgctgctctcatyactatcttttcctcta

SEQ ID NO: 1807 - DNA, 33 bp, Homo sapiens
gtcaagtctgaacctcrcattttctcccatctg

SEQ ID NO: 1808 - DNA, 33 bp, Homo sapiens
gttttgaagatagagarcaaaagctgtgaagaa

SEQ ID NO: 1809 - DNA, 33 bp, Homo sapiens
tacagcaggagggattwaagtcatcctagttcc

SEQ ID NO: 1810 - DNA, 33 bp, Homo sapiens
tacagttaggtaaagayagagtggtgagggtaa

SEQ ID NO: 1811 - DNA, 33 bp, Homo sapiens
tagagaggtcctccackcagatacttaaagatt

SEQ ID NO: 1812 - DNA, 33 bp, Homo sapiens
taggtctatgaagttakgttttcaggagggcta

SEQ ID NO: 1813 - DNA, 33 bp, Homo sapiens
tatatttaatagttaaytccatttttgcagctt

SEQ ID NO: 1814 - DNA, 33 bp, Homo sapiens
tctgtgagaatagaaartgaatcttttgggaag

SEQ ID NO: 1815 - DNA, 33 bp, Homo sapiens
tgcttaatatacttcasatgtctgcaaggggaa

SEQ ID NO: 1816 - DNA, 33 bp, Homo sapiens
tgtataaacaggtgaaygaaatgtgacatatac

SEQ ID NO: 1817 - DNA, 33 bp, Homo sapiens
tgtgggagatgataagwatttgttgttttgggt

SEQ ID NO: 1818 - DNA, 33 bp, Homo sapiens
tgttccattaagtcacygtaatttcttacctga

SEQ ID NO: 1819 - DNA, 33 bp, Homo sapiens
ttaccgtctagaagacygacaaacaacccctgc

SEQ ID NO: 1820 - DNA, 33 bp, Homo sapiens
acttacttgctagaaartatgggacagggtcag

SEQ ID NO: 1821 - DNA, 33 bp, Homo sapiens
ttacttggattgcagayggctttttctctgggc

SEQ ID NO: 1822 - DNA, 33 bp, Homo sapiens
ttagaatgcaagttagraccaacatgattaaaa

SEQ ID NO: 1823 - DNA, 33 bp, Homo sapiens
ttcctttgccacagaartgagacatttacagca

SEQ ID NO: 1824 - DNA, 33 bp, Homo sapiens
ttgtttaccccatatcrattcacccttccttcc

SEQ ID NO: 1825 - DNA, 33 bp, Homo sapiens
tttattagttagcactyagaatgagttcatttt

SEQ ID NO: 1826 - DNA, 33 bp, Homo sapiens
ttttgtgccacattcartccctgcaaaggctct

SEQ ID NO: 1827 - DNA, 33 bp, Homo sapiens
ggtcagggactaaggasagtacacccagtccta

SEQ ID NO: 1828 - DNA, 33 bp, Homo sapiens
tacgtagaaggctgtcyctttttatcatttatt

SEQ ID NO: 1829 - DNA, 33 bp, Homo sapiens
aataaagtctccaagayagctttgtggataaga

SEQ ID NO: 1830 - DNA, 33 bp, Homo sapiens
attaggcccagatttasagtgaaatggcatgct

SEQ ID NO: 1831 - DNA, 33 bp, Homo sapiens
gcagtaaagtgcaaaastcagtgctgttggctc

SEQ ID NO: 1832 - DNA, 33 bp, Homo sapiens
gagtaaaaatacaccartgattcttctgtagac

SEQ ID NO: 1833 - DNA, 33 bp, Homo sapiens
gcagtcggaccgattcracattgacctctgctc

SEQ ID NO: 1834 - DNA, 33 bp, Homo sapiens
gctttagaaacccagtraaatacatcagaacct

SEQ ID NO: 1835 - DNA, 33 bp, Homo sapiens
gatgggcacaaagacayggagaattccaggtgg

SEQ ID NO: 1836 - DNA, 33 bp, Homo sapiens
gaacttgccaggctaaraatgatattaacatta

SEQ ID NO: 1837 - DNA, 33 bp, Homo sapiens
tccaaattataaccctraggcagtgaagataaa

SEQ ID NO: 1838 - DNA, 33 bp, Homo sapiens
acatacatttctcatcrcgctcaagggactctt

SEQ ID NO: 1839 - DNA, 33 bp, Homo sapiens
gtaggaagggtaaaccraaaagcgcaggagagg

SEQ ID NO: 1840 - DNA, 33 bp, Homo sapiens
ttctttttttctcatcycaagtcttcaaactcc

SEQ ID NO: 1841 - DNA, 33 bp, Homo sapiens
tattaacttaaacaccratttgctcaaatttct

SEQ ID NO: 1842 - DNA, 33 bp, Homo sapiens
aaagaaactgaatctgyagttgaaaaccttact

SEQ ID NO: 1843 - DNA, 33 bp, Homo sapiens
aaatcttaaatccacargatgaattacagacta

SEQ ID NO: 1844 - DNA, 33 bp, Homo sapiens
aacatccggtatggtaygacacagcgggtttgg

SEQ ID NO: 1845 - DNA, 33 bp, Homo sapiens
aaggaacacttacgcayggttgatgggaatgta

SEQ ID NO: 1846 - DNA, 33 bp, Homo sapiens
aaggtccaagaactgarctttgggacactccaa

SEQ ID NO: 1847 - DNA, 33 bp, Homo sapiens
aatgtctctcaaaagayggactggctagctcac

SEQ ID NO: 1848 - DNA, 33 bp, Homo sapiens
acctgcccctttcccaygtgctgtaggctttcc

SEQ ID NO: 1849 - DNA, 33 bp, Homo sapiens
actcctgctgctcccargtgtaaagagtgaccc

SEQ ID NO: 1850 - DNA, 33 bp, Homo sapiens
acttggaactatagaartactgcattattgcaa

SEQ ID NO: 1851 - DNA, 33 bp, Homo sapiens
agaagttgaacataggrattaggagattgtgca

SEQ ID NO: 1852 - DNA, 33 bp, Homo sapiens
agactcaaaagacatgratgatccaaatatgac

SEQ ID NO: 1853 - DNA, 33 bp, Homo sapiens
agagcagctggacaacycaaatcaacgctggac

SEQ ID NO: 1854 - DNA, 33 bp, Homo sapiens
agggaatttaggaaacwataggaaatcaacact

SEQ ID NO: 1855 - DNA, 33 bp, Homo sapiens
tgctactgtgttttgcscagagttaggacaatt

SEQ ID NO: 1856 - DNA, 33 bp, Homo sapiens
atacaaccagcaaacasctagattgcagctaca

SEQ ID NO: 1857 - DNA, 33 bp, Homo sapiens
atacttaatttttccartatggtctaggttaga

SEQ ID NO: 1858 - DNA, 33 bp, Homo sapiens
atatcctataagttgamgaaatatgtcaatgct

SEQ ID NO: 1859 - DNA, 33 bp, Homo sapiens
atatgagactggaagayaagagagacttcccac

SEQ ID NO: 1860 - DNA, 33 bp, Homo sapiens
atcaatacttaccctamagctgcagtaattcag

SEQ ID NO: 1861 - DNA, 33 bp, Homo sapiens
atcaccaataacagggsaaactgatatcatatg

SEQ ID NO: 1862 - DNA, 33 bp, Homo sapiens
atgagacatttagaacrgtgcctgtcacctagt

SEQ ID NO: 1863 - DNA, 33 bp, Homo sapiens
attatgcctgagaattkaataagggtcttaaca

SEQ ID NO: 1864 - DNA, 33 bp, Homo sapiens
attccttctgaatgcaractgttgatatccttc

SEQ ID NO: 1865 - DNA, 33 bp, Homo sapiens
caaaatcatggctccayctctgtgatattttga

SEQ ID NO: 1866 - DNA, 33 bp, Homo sapiens
caaaatgaaatagaaamaacagagtagcccaaa

SEQ ID NO: 1867 - DNA, 33 bp, Homo sapiens
caagacaaaagtcaagrcactcctctttttaac

SEQ ID NO: 1868 - DNA, 33 bp, Homo sapiens
caagttatacagaggcycaaatgcacacccagt

SEQ ID NO: 1869 - DNA, 33 bp, Homo sapiens
cacacatattcagttcrctgtgaaatccgtcca

SEQ ID NO: 1870 - DNA, 33 bp, Homo sapiens
cagaaataagcagttawacagaggaaaactcag

SEQ ID NO: 1871 - DNA, 33 bp, Homo sapiens
cagcttacactggccaygtggtatcttgatgaa

SEQ ID NO: 1872 - DNA, 33 bp, Homo sapiens
caggtactgaactcccrgctcctctacagcctg

SEQ ID NO: 1873 - DNA, 33 bp, Homo sapiens
catcggtttgcagaacygtgtcatggaaaccac

SEQ ID NO: 1874 - DNA, 33 bp, Homo sapiens
ccaaatctcgtgagaartcctcactatcacgag

SEQ ID NO: 1875 - DNA, 33 bp, Homo sapiens
ccacactttgctaatcmatagtcacccaaccag

SEQ ID NO: 1876 - DNA, 33 bp, Homo sapiens
cccaatgtctcatggcyagcaagtatgaaactc

SEQ ID NO: 1877 - DNA, 33 bp, Homo sapiens
cccagcacccatttgargagtttgtgcttccca

SEQ ID NO: 1878 - DNA, 33 bp, Homo sapiens
cccccgctgggcagcayatctgtgttttggcaa

SEQ ID NO: 1879 - DNA, 33 bp, Homo sapiens
ccctgtagtatagtccraagttgggtactgtga

SEQ ID NO: 1880 - DNA, 33 bp, Homo sapiens
cgcgcccggccaagacraatcatttctacatgc

SEQ ID NO: 1881 - DNA, 33 bp, Homo sapiens
cggcaggtccgtctgtraaatggaggaggtctt

SEQ ID NO: 1882 - DNA, 33 bp, Homo sapiens
ctaagctaactgaaaarattggcatatcacagg

SEQ ID NO: 1883 - DNA, 33 bp, Homo sapiens
ctgaaagataacaaaakgcgtgctcatgggaaa

SEQ ID NO: 1884 - DNA, 33 bp, Homo sapiens
ctgtttgacttcaaggycaggatcccgttttcc

SEQ ID NO: 1885 - DNA, 33 bp, Homo sapiens
cttcacccaccaggaamaaatggcacatttact

SEQ ID NO: 1886 - DNA, 33 bp, Homo sapiens
ctttacggtagcgaaartagctgacgcacatat

SEQ ID NO: 1887 - DNA, 33 bp, Homo sapiens
ctttatgtatgccaaayattgttctcagtgctt

SEQ ID NO: 1888 - DNA, 33 bp, Homo sapiens
gaattcattaagatacrgtaaggtcataagagt

SEQ ID NO: 1889 - DNA, 33 bp, Homo sapiens
gagcgaggaaggcagaygagaggatctttccag

SEQ ID NO: 1890 - DNA, 33 bp, Homo sapiens
gagctggaaataaagarcaatcatttgaatcaa

SEQ ID NO: 1891 - DNA, 33 bp, Homo sapiens
gaggaagcctgatacargacttggattcgccat

SEQ ID NO: 1892 - DNA, 33 bp, Homo sapiens
gagtccagaaatagtgraaacccagataacagg

SEQ ID NO: 1893 - DNA, 33 bp, Homo sapiens
gatagtaccaacttcawgaggattgctgtgctc

SEQ ID NO: 1894 - DNA, 33 bp, Homo sapiens
gatcagatttacttaargctccatcatcacaca

SEQ ID NO: 1895 - DNA, 33 bp, Homo sapiens
gcatacacattctttayagttgcattcctgaga

SEQ ID NO: 1896 - DNA, 33 bp, Homo sapiens
gctggaagaattcagargaagatgctagaaaag

SEQ ID NO: 1897 - DNA, 33 bp, Homo sapiens
gctttggtgggaaataygatcaggactgagacc

SEQ ID NO: 1898 - DNA, 33 bp, Homo sapiens
agctgaggcttttagaygtagattaggttggtg

SEQ ID NO: 1899 - DNA, 33 bp, Homo sapiens
aggcggaggaagacaargagtggtatcatggaa

SEQ ID NO: 1900 - DNA, 33 bp, Homo sapiens
tattaaactgaatgtcrcaggtaattgtaacac

SEQ ID NO: 1901 - DNA, 33 bp, Homo sapiens
tactattactgtttaayaaagtacaccataact

SEQ ID NO: 1902 - DNA, 33 bp, Homo sapiens
taagtaatcacttgtgyaatggctgcggacgcc

SEQ ID NO: 1903 - DNA, 33 bp, Homo sapiens
tggattttcagaccagrctgagctgaagttttt

SEQ ID NO: 1904 - DNA, 33 bp, Homo sapiens
ccacaaccacatgataycacctctcagagtcct

SEQ ID NO: 1905 - DNA, 33 bp, Homo sapiens
tttggagctaaatgaarggttctgaggctggca

SEQ ID NO: 1906 - DNA, 33 bp, Homo sapiens
tcctcagttgtgatacrggagtcatgaaagtaa

SEQ ID NO: 1907 - DNA, 33 bp, Homo sapiens
catcacattctggtgtyaaactttaagcagtca

SEQ ID NO: 1908 - DNA, 33 bp, Homo sapiens
cctgacttaccaatgcragatcaccccgagaag

SEQ ID NO: 1909 - DNA, 33 bp, Homo sapiens
tccctcagagatgaaargagaggggaaggaaaa

SEQ ID NO: 1910 - DNA, 33 bp, Homo sapiens
tttggaattataggccygaacattctcgtgaac

SEQ ID NO: 1911 - DNA, 33 bp, Homo sapiens
agtcagggcagtggtcractattaaaaaaatta

SEQ ID NO: 1912 - DNA, 33 bp, Homo sapiens
agagaaatctgtgagargattggaaggcagaag

SEQ ID NO: 1913 - DNA, 33 bp, Homo sapiens
gggaaaagagggccaastagacacacccaggaa

SEQ ID NO: 1914 - DNA, 33 bp, Homo sapiens
gtaggagtttgcaagaragtagttctgaagatc

SEQ ID NO: 1915 - DNA, 33 bp, Homo sapiens
agtgtacatggtttcaygattatagctcgtttt

SEQ ID NO: 1916 - DNA, 33 bp, Homo sapiens
tggaaagtgtgatgaamtctataaagcagggta

SEQ ID NO: 1917 - DNA, 33 bp, Homo sapiens
ggcttttactgtgacartcactcaaatagtgta

SEQ ID NO: 1918 - DNA, 33 bp, Homo sapiens
tgaggcagcactctagwaaggatttttaactgc

SEQ ID NO: 1919 - DNA, 33 bp, Homo sapiens
agtttgataatgtaaaytggggaaagtgagtat

SEQ ID NO: 1920 - DNA, 33 bp, Homo sapiens
ttggacatttgcacaakaattaactttaccaat

SEQ ID NO: 1921 - DNA, 33 bp, Homo sapiens
tattcacttgttctccraaataaatctgtaaag

SEQ ID NO: 1922 - DNA, 33 bp, Homo sapiens
aagagatgctgactccraaatgtaaaataaccc

SEQ ID NO: 1923 - DNA, 33 bp, Homo sapiens
actgaatttatgctgaygtgactataatcttca

SEQ ID NO: 1924 - DNA, 33 bp, Homo sapiens
ataataccagcatccasagtcaattgtgttcca

SEQ ID NO: 1925 - DNA, 33 bp, Homo sapiens
ggactggataggagaakgtagctcggagaaagt

SEQ ID NO: 1926 - DNA, 33 bp, Homo sapiens
ctggcccattgagacartcaaaactgattaatt

SEQ ID NO: 1927 - DNA, 33 bp, Homo sapiens
cactgtgtaagcaagaycaggttagttctctca

SEQ ID NO: 1928 - DNA, 33 bp, Homo sapiens
aaaaaatccaattttgracatgaaaatatatgc

SEQ ID NO: 1929 - DNA, 33 bp, Homo sapiens
gtaacattgctagtgartacacattttagaagg

SEQ ID NO: 1930 - DNA, 33 bp, Homo sapiens
ctgaataattttgatcracagctgcactgtcaa

SEQ ID NO: 1931 - DNA, 33 bp, Homo sapiens
cagccccaggttctccrgctaatgggattccag

SEQ ID NO: 1932 - DNA, 33 bp, Homo sapiens
atgtattgagagcctaycattttctagaaccca

SEQ ID NO: 1933 - DNA, 33 bp, Homo sapiens
caatgattttgggacaygtgaaaatgcttttac

SEQ ID NO: 1934 - DNA, 33 bp, Homo sapiens
tcagaaatgctttggaygagacgtattttgcat

SEQ ID NO: 1935 - DNA, 33 bp, Homo sapiens
cccaggtatagcaatakaaacgctacagaagct

SEQ ID NO: 1936 - DNA, 33 bp, Homo sapiens
gttgatagaatccagasaagataaaaagaagat

SEQ ID NO: 1937 - DNA, 33 bp, Homo sapiens
actattttctaccacayctaatttcactacaaa

SEQ ID NO: 1938 - DNA, 33 bp, Homo sapiens
tcagaagtgcttaaagkatatgaacagatattt

SEQ ID NO: 1939 - DNA, 33 bp, Homo sapiens
gctgcctggactgttayattaggaaggattgtg

SEQ ID NO: 1940 - DNA, 33 bp, Homo sapiens
gttaactgctagaagayggcagcagatgacact

SEQ ID NO: 1941 - DNA, 33 bp, Homo sapiens
tctttggtggtattgawgagaaggaaactctat

SEQ ID NO: 1942 - DNA, 33 bp, Homo sapiens
gtggactgatggttcamcataaaatacttgcag

SEQ ID NO: 1943 - DNA, 33 bp, Homo sapiens
ttatgtatgatctacaraaaataaccgtttgac

SEQ ID NO: 1944 - DNA, 33 bp, Homo sapiens
ctctcagtggcctacgmatcgccagtcctgaca

SEQ ID NO: 1945 - DNA, 33 bp, Homo sapiens
tgttttgagattcaaaygtaacacagggaatag

SEQ ID NO: 1946 - DNA, 33 bp, Homo sapiens
gcatcttcgacatccaycaatttggtaccacag

SEQ ID NO: 1947 - DNA, 33 bp, Homo sapiens
ggggttcagtcactcasagattccacctgggtg

SEQ ID NO: 1948 - DNA, 33 bp, Homo sapiens
cttccttctctatccaytcactggctgttgtgg

SEQ ID NO: 1949 - DNA, 33 bp, Homo sapiens
ctagggtgtccttttamgctgcaaagttcctgc

SEQ ID NO: 1950 - DNA, 33 bp, Homo sapiens
gtactctagattctctsaaaaatcccatggttc

SEQ ID NO: 1951 - DNA, 33 bp, Homo sapiens
agttggcaattctgacsgactgttgtctgggag

SEQ ID NO: 1952 - DNA, 33 bp, Homo sapiens
actttcgttccttccaytccaccaaacttgatg

SEQ ID NO: 1953 - DNA, 33 bp, Homo sapiens
aattattattgcttcaraaacttttatcttaga

SEQ ID NO: 1954 - DNA, 33 bp, Homo sapiens
ctttactgttgctaackgaaggaattgaggtat

SEQ ID NO: 1955 - DNA, 33 bp, Homo sapiens
taaattagcataaatcwataaggaggtcaaagc

SEQ ID NO: 1956 - DNA, 33 bp, Homo sapiens
acgtaggacgccggcasagaaggagccgggtgg

SEQ ID NO: 1957 - DNA, 33 bp, Homo sapiens
tgaaaactgccttatcratgtaagtggttgggt

SEQ ID NO: 1958 - DNA, 33 bp, Homo sapiens
tcatttctgtaggcaaytctgtcacactgttgt

SEQ ID NO: 1959 - DNA, 33 bp, Homo sapiens
agaagacaggatctgaygggctaagtatcttgc

SEQ ID NO: 1960 - DNA, 33 bp, Homo sapiens
agaggaaatgatgtgcraatgagaaaattttaa

SEQ ID NO: 1961 - DNA, 33 bp, Homo sapiens
aactcctcaaaagaatkaaggcggaacatgaca

SEQ ID NO: 1962 - DNA, 33 bp, Homo sapiens
tttcaattatgctccaytgacataacagctgtt

SEQ ID NO: 1963 - DNA, 33 bp, Homo sapiens
aaataaaacagatatcmaaaatttcttacacac

SEQ ID NO: 1964 - DNA, 33 bp, Homo sapiens
taaataggtgcccaaarcaaatctgttgaatga

SEQ ID NO: 1965 - DNA, 33 bp, Homo sapiens
aaatgatcttaaagaaygaggttgtgccttact

SEQ ID NO: 1966 - DNA, 33 bp, Homo sapiens
tctttgacacaggcttwaaaaaaataaagaaag

SEQ ID NO: 1967 - DNA, 33 bp, Homo sapiens
tggacttggagatggakagtgagtacacggaga

SEQ ID NO: 1968 - DNA, 33 bp, Homo sapiens
atggcacggggaaagasagaatgactcaaacat

SEQ ID NO: 1969 - DNA, 33 bp, Homo sapiens
tataatctcaagcaaarcatctggtgcctcagt

SEQ ID NO: 1970 - DNA, 33 bp, Homo sapiens
acctggacacacaacamgtattccagagactct

SEQ ID NO: 1971 - DNA, 33 bp, Homo sapiens
tgtgtggttacttcaayatcctgtcataccagt

SEQ ID NO: 1972 - DNA, 33 bp, Homo sapiens
aagcatattctcaggcyctacctcaaacctaca

SEQ ID NO: 1973 - DNA, 33 bp, Homo sapiens
gaaggggcatttctgawtaagatctgggccgct

SEQ ID NO: 1974 - DNA, 33 bp, Homo sapiens
gagtgagaccaaaatayggagcaaatcaacata

SEQ ID NO: 1975 - DNA, 33 bp, Homo sapiens
gttgcctgtaagcctargtttgcttgttctttc

SEQ ID NO: 1976 - DNA, 33 bp, Homo sapiens
taatcgatcagagatgsaagcagttcaaattgt

SEQ ID NO: 1977 - DNA, 33 bp, Homo sapiens
attctattaatgagaamgtgtgaagtaggagac

SEQ ID NO: 1978 - DNA, 33 bp, Homo sapiens
acattccagcatggagycaagactgctcgtgac

SEQ ID NO: 1979 - DNA, 33 bp, Homo sapiens
tctattttgcatgaaaraaaaagagtcgtagtt

SEQ ID NO: 1980 - DNA, 33 bp, Homo sapiens
caaaataaaaggtgtakagcaatttcagcggat

SEQ ID NO: 1981 - DNA, 33 bp, Homo sapiens
tgtgtctagcctttaayagtcacttaataaagg

SEQ ID NO: 1982 - DNA, 33 bp, Homo sapiens
tttgaccatacctagtyaaacttaaattgaagg

SEQ ID NO: 1983 - DNA, 33 bp, Homo sapiens
attttcctttaacatcmgatattggcagccagc

SEQ ID NO: 1984 - DNA, 33 bp, Homo sapiens
catcagatattggcagycagcttttccagattt

SEQ ID NO: 1985 - DNA, 33 bp, Homo sapiens
ctgagaataagaggaasagaagatatgagggtg

SEQ ID NO: 1986 - DNA, 33 bp, Homo sapiens
gatggccatttctccartgaagtttcctgtagc

SEQ ID NO: 1987 - DNA, 33 bp, Homo sapiens
gatttatatcccagctsaacctcttataactgt

SEQ ID NO: 1988 - DNA, 33 bp, Homo sapiens
tgtctatagtttcccasgcattactaactcatg

SEQ ID NO: 1989 - DNA, 33 bp, Homo sapiens
gaaatagccttacaacrctgtgaattcaatcct

SEQ ID NO: 1990 - DNA, 33 bp, Homo sapiens
tctgccagagaaagtcsaaaatctgtaaaggaa

SEQ ID NO: 1991 - DNA, 33 bp, Homo sapiens
tggtgggactgtcaacragttcatccattgtgg

SEQ ID NO: 1992 - DNA, 33 bp, Homo sapiens
caatacaagaaaaggamgaagaagttcacacct

SEQ ID NO: 1993 - DNA, 33 bp, Homo sapiens
cttgccttgggatcctmaaaatgcatctgcctt

SEQ ID NO: 1994 - DNA, 33 bp, Homo sapiens
acaatctcagcctgttraaattgcctgagtttt

SEQ ID NO: 1995 - DNA, 33 bp, Homo sapiens
agctacttgggaactaygactgtactactgtac

SEQ ID NO: 1996 - DNA, 33 bp, Homo sapiens
gaaagtctgaggcaatyatagaaacatcagccc

SEQ ID NO: 1997 - DNA, 33 bp, Homo sapiens
ccccaggtaatcccaaygtgagcctgggctatg

SEQ ID NO: 1998 - DNA, 33 bp, Homo sapiens
cgtgccggatacctagraggccacattccacag

SEQ ID NO: 1999 - DNA, 33 bp, Homo sapiens
aataacatcctttgtcyctgaaccaagtttcat

SEQ ID NO: 2000 - DNA, 33 bp, Homo sapiens
taacagttgtttctcasaggtataattcaaact

SEQ ID NO: 2001 - DNA, 33 bp, Homo sapiens
ccgtttactagtttgayagtgattgccaaattg

SEQ ID NO: 2002 - DNA, 33 bp, Homo sapiens
caattgtgattgatgcragtagcacccttctgc

SEQ ID NO: 2003 - DNA, 33 bp, Homo sapiens
tttttatcattccaaaragaggaaataaaccaa

SEQ ID NO: 2004 - DNA, 33 bp, Homo sapiens
aagatcacatgtgttayaccttaacgaaaaact

SEQ ID NO: 2005 - DNA, 33 bp, Homo sapiens
gaactgggaaactgtcyatcataatggcaccag

SEQ ID NO: 2006 - DNA, 33 bp, Homo sapiens
ctactgtcatttctacygggcagctgagacctt

SEQ ID NO: 2007 - DNA, 33 bp, Homo sapiens
gctgtattccgtatcasacaacaacagttgagg

SEQ ID NO: 2008 - DNA, 33 bp, Homo sapiens
gaaactgcaatgtaaarttatggtcacaaagca

SEQ ID NO: 2009 - DNA, 33 bp, Homo sapiens
agggagtgctgctgaayggactccaggaggcgg

SEQ ID NO: 2010 - DNA, 33 bp, Homo sapiens
cagtttctatgggttargaattcagaaagggca

SEQ ID NO: 2011 - DNA, 33 bp, Homo sapiens
cagggtcaaattactayctgtatccttctgatg

SEQ ID NO: 2012 - DNA, 33 bp, Homo sapiens
gctattaagtgggtaayaggatggacaattctt

SEQ ID NO: 2013 - DNA, 33 bp, Homo sapiens
tagcatctaacataagmctagattcagcatata

SEQ ID NO: 2014 - DNA, 33 bp, Homo sapiens
tttgattaacaagactwacaaatttggtataat

SEQ ID NO: 2015 - DNA, 33 bp, Homo sapiens
ggctgagatgacccaaracctgcaattggaaag

SEQ ID NO: 2016 - DNA, 33 bp, Homo sapiens
aggcagactgaattgaygtttaggcagcaagcc

SEQ ID NO: 2017 - DNA, 33 bp, Homo sapiens
cctctgagtccgataaytaagaagagtgaccat

SEQ ID NO: 2018 - DNA, 33 bp, Homo sapiens
agtagaaccaccttacyacctgaagttgcagag

SEQ ID NO: 2019 - DNA, 33 bp, Homo sapiens
tgtatacactaaaggcycccctcagtcttaaat

SEQ ID NO: 2020 - DNA, 33 bp, Homo sapiens
tagcagctcatacaagsataggtgatatcacaa

SEQ ID NO: 2021 - DNA, 33 bp, Homo sapiens
atcaatagcagattcarcttgcctttaccatgt

SEQ ID NO: 2022 - DNA, 33 bp, Homo sapiens
tatccccttcctgccgmatgactaaaactaaat

SEQ ID NO: 2023 - DNA, 33 bp, Homo sapiens
ttttctaccaatcatgraccttttctttgaata

SEQ ID NO: 2024 - DNA, 33 bp, Homo sapiens
gtatctcacatctgctyagagcccacgccgcta

SEQ ID NO: 2025 - DNA, 33 bp, Homo sapiens
aagaataactgtatcartcagggtaagtctagg

SEQ ID NO: 2026 - DNA, 33 bp, Homo sapiens
agagctatcataaaccratgaccaaaatcatgc

SEQ ID NO: 2027 - DNA, 33 bp, Homo sapiens
gagttgttgtttagcaygaatgttgttacaatg

SEQ ID NO: 2028 - DNA, 33 bp, Homo sapiens
gccatgaggccccccarattcacctggagagcc

SEQ ID NO: 2029 - DNA, 33 bp, Homo sapiens
gttggtctagatccaartacagcatttcttaaa

SEQ ID NO: 2030 - DNA, 33 bp, Homo sapiens
caaagaaccatccaacygagtccaaactgccaa

SEQ ID NO: 2031 - DNA, 33 bp, Homo sapiens
gggcaggtggactctgycaataccctggatgtg

SEQ ID NO: 2032 - DNA, 33 bp, Homo sapiens
atgctgtaaactgtgaygtctatgaatatctga

SEQ ID NO: 2033 - DNA, 33 bp, Homo sapiens
ctggctctgtcattgastagctctgtagctctg

SEQ ID NO: 2034 - DNA, 33 bp, Homo sapiens
aggaaaatattcacccrcttagcacaacccatg

SEQ ID NO: 2035 - DNA, 33 bp, Homo sapiens
tcagaaacagattggaygctttaaaaaattcca

SEQ ID NO: 2036 - DNA, 33 bp, Homo sapiens
tctctgtggcatctgcrcggtaataaaatttaa

SEQ ID NO: 2037 - DNA, 33 bp, Homo sapiens
gagagttctgccagaarctaagttcattcaaag

SEQ ID NO: 2038 - DNA, 33 bp, Homo sapiens
tatgtataaccttgaastgtgaaggccaggatc

SEQ ID NO: 2039 - DNA, 33 bp, Homo sapiens
aaggggacaaggtagaygtgcatgaggtccctt

SEQ ID NO: 2040 - DNA, 33 bp, Homo sapiens
agctgaccagagtgggragtcagaagtctccat

SEQ ID NO: 2041 - DNA, 33 bp, Homo sapiens
tgtcaggtctgcacgargatctaggaatacagc

SEQ ID NO: 2042 - DNA, 33 bp, Homo sapiens
gctctctccaaggaccracaggatcgctctgcc

SEQ ID NO: 2043 - DNA, 33 bp, Homo sapiens
agcagattggaggcacrgtcttgtaccaacaaa

SEQ ID NO: 2044 - DNA, 33 bp, Homo sapiens
agtttgaggctacagtyactaatgattgcccca

SEQ ID NO: 2045 - DNA, 33 bp, Homo sapiens
gtgcttagaagttcaayggaaaagcatctggaa

SEQ ID NO: 2046 - DNA, 33 bp, Homo sapiens
ttttgaatagttatcaygtgcatacagtaaagc

SEQ ID NO: 2047 - DNA, 33 bp, Homo sapiens
aatggatctgtacaaaygaacctactaaaataa

SEQ ID NO: 2048 - DNA, 33 bp, Homo sapiens
aaggcattccattttgkataggatagctaatgc

SEQ ID NO: 2049 - DNA, 33 bp, Homo sapiens
aatagccagttagcagkcctcagagcttctctg

SEQ ID NO: 2050 - DNA, 33 bp, Homo sapiens
tatcaattgtttcaaaygcactaaagtaaatag

SEQ ID NO: 2051 - DNA, 33 bp, Homo sapiens
aatttgactttcaatawgattttggtataaagg

SEQ ID NO: 2052 - DNA, 33 bp, Homo sapiens
aggtgttatcttctccrcttagaatgattcctc

SEQ ID NO: 2053 - DNA, 33 bp, Homo sapiens
taaaaatgatctccaargtcttctccaatttta

SEQ ID NO: 2054 - DNA, 33 bp, Homo sapiens
tgatggggaattagccyaagactaactgcttct

SEQ ID NO: 2055 - DNA, 33 bp, Homo sapiens
tatctaacattttcccwcctggtcttgacctat

SEQ ID NO: 2056 - DNA, 33 bp, Homo sapiens
ccatcacaacattcatstcctctgagtccaggt

SEQ ID NO: 2057 - DNA, 33 bp, Homo sapiens
tctgttaacgtaccatratctgtgcttcgctcg

SEQ ID NO: 2058 - DNA, 33 bp, Homo sapiens
ttaaatgaatgtcccamataaagtcacatgagc

SEQ ID NO: 2059 - DNA, 33 bp, Homo sapiens
tggttgtagacattacrcagcaccattgttagt

SEQ ID NO: 2060 - DNA, 33 bp, Homo sapiens
gagtgagatacatgaaytccaaatatctgagac

SEQ ID NO: 2061 - DNA, 33 bp, Homo sapiens
ggctttacatcttaccygcttgactaagctaca

SEQ ID NO: 2062 - DNA, 33 bp, Homo sapiens
tcaccagtatgtaaaawccttgcaaattctgac

SEQ ID NO: 2063 - DNA, 33 bp, Homo sapiens
taaaaaaagcagagtgyacaaggaggtcaagtt

SEQ ID NO: 2064 - DNA, 33 bp, Homo sapiens
ttgaagttaggctttgmagagccctggattttg

SEQ ID NO: 2065 - DNA, 33 bp, Homo sapiens
agcctaacttcaactcrcctgcccaaccttacc

SEQ ID NO: 2066 - DNA, 33 bp, Homo sapiens
tcataggataaacaaayagcaaatgtacagcct

SEQ ID NO: 2067 - DNA, 33 bp, Homo sapiens
agtggaagagaatgaaytcggtggagagagaga

SEQ ID NO: 2068 - DNA, 33 bp, Homo sapiens
tcccggaagatttttcrctaactttgcccacat

SEQ ID NO: 2069 - DNA, 33 bp, Homo sapiens
cctgggcagaggatagkatgaaagtcagcacta

SEQ ID NO: 2070 - DNA, 33 bp, Homo sapiens
ccttccaaggctgttcraaataccaaatacaaa

SEQ ID NO: 2071 - DNA, 33 bp, Homo sapiens
ttaaagaagatggtcaygaaataggtttgctac

SEQ ID NO: 2072 - DNA, 33 bp, Homo sapiens
tcttgtattctgactcracccctgcagactgca

SEQ ID NO: 2073 - DNA, 33 bp, Homo sapiens
aatgtgaactggctaasatgtaatgaccttttc

SEQ ID NO: 2074 - DNA, 33 bp, Homo sapiens
tcccgagcatcaataamgtgtgtcatgatgtaa

SEQ ID NO: 2075 - DNA, 33 bp, Homo sapiens
atggaggctgagaacaygcacgtcttacaagtt

SEQ ID NO: 2076 - DNA, 33 bp, Homo sapiens
gagagacagcttatackcatgaattggaagact

SEQ ID NO: 2077 - DNA, 33 bp, Homo sapiens
caatcttaacagaagamgtgcctgaaatctact

SEQ ID NO: 2078 - DNA, 33 bp, Homo sapiens
tcccaaaagcaatatgkaaagtgaatgaaacca

SEQ ID NO: 2079 - DNA, 33 bp, Homo sapiens
cagcttccattgttackgaggttaactttacta

SEQ ID NO: 2080 - DNA, 33 bp, Homo sapiens
gatgggaaataaacagmacggcagagaataaaa

SEQ ID NO: 2081 - DNA, 33 bp, Homo sapiens
tttgggttctgatgaaytgtaggtaaagggaaa

SEQ ID NO: 2082 - DNA, 33 bp, Homo sapiens
taagggtacctttaacygaactgaatctcttct

SEQ ID NO: 2083 - DNA, 33 bp, Homo sapiens
ggagacttcagtaattraagagaggatgttctc

SEQ ID NO: 2084 - DNA, 33 bp, Homo sapiens
ttttacatccttgctckcctgactttcatgaaa

SEQ ID NO: 2085 - DNA, 33 bp, Homo sapiens
aatctaagttaatccayacatgaggatataaaa

SEQ ID NO: 2086 - DNA, 33 bp, Homo sapiens
cgtagtcaataacaacsaaatggctggctgtcc

SEQ ID NO: 2087 - DNA, 33 bp, Homo sapiens
tgttaaataaataaacyaggcagagaaagacaa

SEQ ID NO: 2088 - DNA, 33 bp, Homo sapiens
gaacacaaatcaagaaygagtgcaattttctgg

SEQ ID NO: 2089 - DNA, 33 bp, Homo sapiens
ttaaactggataccgasacccagattgaggtga

SEQ ID NO: 2090 - DNA, 33 bp, Homo sapiens
atgaaacatgttttcaracctgagtagctgggt

SEQ ID NO: 2091 - DNA, 33 bp, Homo sapiens
tggtctgtataacagtkaatgtggtccctggtt

SEQ ID NO: 2092 - DNA, 33 bp, Homo sapiens
ttgctcaacttcagtcyctgtgtccaatcccac

SEQ ID NO: 2093 - DNA, 33 bp, Homo sapiens
aacaaaagtctctggargtgttgtctatattta

SEQ ID NO: 2094 - DNA, 33 bp, Homo sapiens
acaagtccactctgaayctctccagctacggag

SEQ ID NO: 2095 - DNA, 33 bp, Homo sapiens
cacttgaacaattggaygtaatagaaatctaca

SEQ ID NO: 2096 - DNA, 33 bp, Homo sapiens
ttcactgtgttcttgasaatgccgctctgcagt

SEQ ID NO: 2097 - DNA, 33 bp, Homo sapiens
cttagaacatttgtaayctgtctttcaaatggt

SEQ ID NO: 2098 - DNA, 33 bp, Homo sapiens
gattagatgaggaatgsataatggatatttggc

SEQ ID NO: 2099 - DNA, 33 bp, Homo sapiens
gctagatgacaacaaargtgaatgaattacagc

SEQ ID NO: 2100 - DNA, 33 bp, Homo sapiens
cctcctagaatgtctcrattagcaaccttttgc

SEQ ID NO: 2101 - DNA, 33 bp, Homo sapiens
gacttctgctgaaaacyacctggaaatgacgtc

SEQ ID NO: 2102 - DNA, 33 bp, Homo sapiens
aacacgataataggaasaaatctacaaatatca

SEQ ID NO: 2103 - DNA, 33 bp, Homo sapiens
ttttctgtacctctgakagacaatcactcaaaa

SEQ ID NO: 2104 - DNA, 33 bp, Homo sapiens
gactggccactcttcaygatgacaaaagagctc

SEQ ID NO: 2105 - DNA, 33 bp, Homo sapiens
agtgggactacctgaascaagtagcaacaaaac

SEQ ID NO: 2106 - DNA, 33 bp, Homo sapiens
tgatgaactacattaayaaatcaccatcactgt

SEQ ID NO: 2107 - DNA, 33 bp, Homo sapiens
ataaaccagattgttgmattaccaggatagatg

SEQ ID NO: 2108 - DNA, 33 bp, Homo sapiens
gtgcctggtacatgatragcaatcaatcagcat

SEQ ID NO: 2109 - DNA, 33 bp, Homo sapiens
gaaattaggcttagacwagcataaaaatgaagg

SEQ ID NO: 2110 - DNA, 33 bp, Homo sapiens
ttaattggtagggtgcragaaagtagaacagca

SEQ ID NO: 2111 - DNA, 33 bp, Homo sapiens
ggcaacaactcctctgracttcttatgtgagga

SEQ ID NO: 2112 - DNA, 33 bp, Homo sapiens
gaaatcctgggttagargctcaaagtaaagaac

SEQ ID NO: 2113 - DNA, 33 bp, Homo sapiens
aaaagaaaaatatctcrcactttctacaagtat

SEQ ID NO: 2114 - DNA, 33 bp, Homo sapiens
ttggccatcttggaacygggcactttcaagaca

SEQ ID NO: 2115 - DNA, 33 bp, Homo sapiens
tttttatcttctcctaycctgaaaccagattgc

SEQ ID NO: 2116 - DNA, 33 bp, Homo sapiens
aaatgaaagaaatatayctcatgggcaaacaag

SEQ ID NO: 2117 - DNA, 33 bp, Homo sapiens
gagtcggtaagaatgartcattaggctgttgta

SEQ ID NO: 2118 - DNA, 33 bp, Homo sapiens
aaaatcaaacaggagarcaacgttacacagaat

SEQ ID NO: 2119 - DNA, 33 bp, Homo sapiens
ctcttcctactgtacasaagttcttcatgctta

SEQ ID NO: 2120 - DNA, 33 bp, Homo sapiens
tagcagttaatagcaarcatgttattgagtatt

SEQ ID NO: 2121 - DNA, 33 bp, Homo sapiens
atgtgttctgctttctmaaaaaaatggaaaggt

SEQ ID NO: 2122 - DNA, 33 bp, Homo sapiens
agcgatgctacaacaaygtacaaccccaaaaat

SEQ ID NO: 2123 - DNA, 33 bp, Homo sapiens
gggtaagtgataaatcrgaaagttagtggacga

SEQ ID NO: 2124 - DNA, 33 bp, Homo sapiens
agcttctctatcctcaygatgacaaattttgag

SEQ ID NO: 2125 - DNA, 33 bp, Homo sapiens
atcatcacaagcaatamaacactgagacactgt

SEQ ID NO: 2126 - DNA, 33 bp, Homo sapiens
agtccagaacttctaarctcctgaaacactttg

SEQ ID NO: 2127 - DNA, 33 bp, Homo sapiens
aaatggagaagtttaaytgccctccaagacaaa

SEQ ID NO: 2128 - DNA, 33 bp, Homo sapiens
gcagaggatccaaagtraacccaagctattctc

SEQ ID NO: 2129 - DNA, 33 bp, Homo sapiens
tgattgctaacacgtgmacacttaccatgatta

SEQ ID NO: 2130 - DNA, 33 bp, Homo sapiens
gttttgtttggcatacrgatctttcttggtcat

SEQ ID NO: 2131 - DNA, 33 bp, Homo sapiens
agttatcgtgaaacccrgcattcataaaagcag

SEQ ID NO: 2132 - DNA, 33 bp, Homo sapiens
tatagaagctatcacaraacacattgactttaa

SEQ ID NO: 2133 - DNA, 33 bp, Homo sapiens
tcacttctgttacaaawgaaagggaactctcaa

SEQ ID NO: 2134 - DNA, 33 bp, Homo sapiens
agatattctgaagtcaygaggagcctggactct

SEQ ID NO: 2135 - DNA, 33 bp, Homo sapiens
gctctgagttcctgggycatcgttctccctgga

SEQ ID NO: 2136 - DNA, 33 bp, Homo sapiens
tgaaacactgactttcyaatggtatttaattcg

SEQ ID NO: 2137 - DNA, 33 bp, Homo sapiens
aaatgccttttaccaaygtccagctctagaagc

SEQ ID NO: 2138 - DNA, 33 bp, Homo sapiens
atcttacgttgttctgratttacttcttgcatt

SEQ ID NO: 2139 - DNA, 33 bp, Homo sapiens
taccattttgagattcrccttttcaacacaaca

SEQ ID NO: 2140 - DNA, 33 bp, Homo sapiens
tctgtagaaaacaccayagaggatgtgatacat

SEQ ID NO: 2141 - DNA, 33 bp, Homo sapiens
attttcctgagtacccraatgaatgcccattta

SEQ ID NO: 2142 - DNA, 33 bp, Homo sapiens
ggagaatgagaccacaygtttagagtgccttca

SEQ ID NO: 2143 - DNA, 33 bp, Homo sapiens
ttttgccctaacaaacygccttcacaggcttcc

SEQ ID NO: 2144 - DNA, 33 bp, Homo sapiens
gcactgcatattgtacygaaaaacgtcatggcc

SEQ ID NO: 2145 - DNA, 33 bp, Homo sapiens
tgagatttataggatasgagaaaaacaatgcaa

SEQ ID NO: 2146 - DNA, 33 bp, Homo sapiens
tcaggagaaatgtagcycaggtctgattatttg

SEQ ID NO: 2147 - DNA, 33 bp, Homo sapiens
atcgctgactgaaagayaggtcatttttaaaat

SEQ ID NO: 2148 - DNA, 33 bp, Homo sapiens
ttcattcattgctggaracaatttaaatatcgt

SEQ ID NO: 2149 - DNA, 33 bp, Homo sapiens
tttcttgaagcactccyagattctcataagcag

SEQ ID NO: 2150 - DNA, 33 bp, Homo sapiens
gtcaagtctatttcaastctgtttccaagtctg

SEQ ID NO: 2151 - DNA, 33 bp, Homo sapiens
gtccctctatatgccawggtccctacaatggtt

SEQ ID NO: 2152 - DNA, 33 bp, Homo sapiens
gcctaaaaagaatagcrccatcgagctttttaa

SEQ ID NO: 2153 - DNA, 33 bp, Homo sapiens
ctaggaataaaataaaygggcagctatgaaaat

SEQ ID NO: 2154 - DNA, 33 bp, Homo sapiens
aatctggcttcttacartaatagctctgacacc

SEQ ID NO: 2155 - DNA, 33 bp, Homo sapiens
caatactaagaaactcrctagaatgcagagcag

SEQ ID NO: 2156 - DNA, 33 bp, Homo sapiens
tccctctcacttgataygacatcttatccagca

SEQ ID NO: 2157 - DNA, 33 bp, Homo sapiens
tgaggttgacaggaaayggctgtgcatagatct

SEQ ID NO: 2158 - DNA, 33 bp, Homo sapiens
atgttatttagcaatgraaatggagtaatgata

SEQ ID NO: 2159 - DNA, 33 bp, Homo sapiens
cagtatctccaaaggcraagggaaactgaaagg

SEQ ID NO: 2160 - DNA, 33 bp, Homo sapiens
tgactctagaatcaagracttctatatatgctg

SEQ ID NO: 2161 - DNA, 33 bp, Homo sapiens
cctcaaactgattccartaaccattccagaatc

SEQ ID NO: 2162 - DNA, 33 bp, Homo sapiens
agttttctaacaccaaygaaagagactctaacc

SEQ ID NO: 2163 - DNA, 33 bp, Homo sapiens
gacacattacaccttayagagaagcagtttctg

SEQ ID NO: 2164 - DNA, 33 bp, Homo sapiens
gggctctttgcttgcaraccagttcatcatacc

SEQ ID NO: 2165 - DNA, 33 bp, Homo sapiens
gagcaccctgtaactcmcagagctgtaaacatt

SEQ ID NO: 2166 - DNA, 33 bp, Homo sapiens
agatttcttgattgccsatttagtgttaatgtc

SEQ ID NO: 2167 - DNA, 33 bp, Homo sapiens
gtccgcgttttcacaasatcattttcaatctgc

SEQ ID NO: 2168 - DNA, 33 bp, Homo sapiens
ctctcgctaattctgayaaatctctcatgaatc

SEQ ID NO: 2169 - DNA, 33 bp, Homo sapiens
aattttgaggtgatacwagcatttagtccaaag

SEQ ID NO: 2170 - DNA, 33 bp, Homo sapiens
gtttgttacggaagtayattgtgtgtcgtgggg

SEQ ID NO: 2171 - DNA, 33 bp, Homo sapiens
actgtaatttccctacrgcactgcagaatacta

SEQ ID NO: 2172 - DNA, 33 bp, Homo sapiens
acagatcagatttatcrctttggttacatccct

SEQ ID NO: 2173 - DNA, 33 bp, Homo sapiens
acctttaaccctggtaycatttcaaagtccaac

SEQ ID NO: 2174 - DNA, 33 bp, Homo sapiens
tatccccaagtctccargaaatgtagcttatgt

SEQ ID NO: 2175 - DNA, 33 bp, Homo sapiens
agggggttgtgaacccragggaactgctctgcc

SEQ ID NO: 2176 - DNA, 33 bp, Homo sapiens
catgaagacgatagaaratgttagcagccccaa

SEQ ID NO: 2177 - DNA, 33 bp, Homo sapiens
caatgtttattatctcycttgacattgctattg

SEQ ID NO: 2178 - DNA, 33 bp, Homo sapiens
gtaaatgtggagaaacygaaacaattttacaca

SEQ ID NO: 2179 - DNA, 33 bp, Homo sapiens
tatacaccgtggaacaygagtcataaaaaacaa

SEQ ID NO: 2180 - DNA, 33 bp, Homo sapiens
aaagataataagccacsattgttctaacagtag

SEQ ID NO: 2181 - DNA, 33 bp, Homo sapiens
atgaggggcaaagcacragggagtaggagctta

SEQ ID NO: 2182 - DNA, 33 bp, Homo sapiens
cagtgaacacttgtaarccattttccaattcaa

SEQ ID NO: 2183 - DNA, 33 bp, Homo sapiens
cagcaaagcatagttaygtaaactttcaaagta

SEQ ID NO: 2184 - DNA, 33 bp, Homo sapiens
tttgtaaagcaagaackgactaggaacccctgt

SEQ ID NO: 2185 - DNA, 33 bp, Homo sapiens
tttacattattctgtayagatatcacctggtgt

SEQ ID NO: 2186 - DNA, 33 bp, Homo sapiens
aagaacctgacatccakaagtggtcctggggcc

SEQ ID NO: 2187 - DNA, 33 bp, Homo sapiens
ttttctttatcagttcraccttcgatgcgtact

SEQ ID NO: 2188 - DNA, 33 bp, Homo sapiens
tagctgcatgatttaarcatgtgaagaactcct

SEQ ID NO: 2189 - DNA, 33 bp, Homo sapiens
actttaaaaacgagaaytggaactgtctcccac

SEQ ID NO: 2190 - DNA, 33 bp, Homo sapiens
attcacttaatggtgayctgtaagtctggtagg

SEQ ID NO: 2191 - DNA, 33 bp, Homo sapiens
taagttctctttgcaamgtaacagtagccaaca

SEQ ID NO: 2192 - DNA, 33 bp, Homo sapiens
tcagacatttcccttcrcatctctaaaatgtac

SEQ ID NO: 2193 - DNA, 33 bp, Homo sapiens
taaagatggaaggcacrcattagtattagacct

SEQ ID NO: 2194 - DNA, 33 bp, Homo sapiens
aatacttaaggttcaawtctggagtacacaaga

SEQ ID NO: 2195 - DNA, 33 bp, Homo sapiens
aaaggccatccctgtaygttcgcagagacccca

SEQ ID NO: 2196 - DNA, 33 bp, Homo sapiens
aaaattttacacatcaktcagcttcctcaggct

SEQ ID NO: 2197 - DNA, 33 bp, Homo sapiens
ggctgagaggagagaartaaaatttgaacagtg

SEQ ID NO: 2198 - DNA, 33 bp, Homo sapiens
ggattatcagcatttargccagagttgcaaatt

SEQ ID NO: 2199 - DNA, 33 bp, Homo sapiens
tgcttaaagttaacagsctcaatctaaggatct

SEQ ID NO: 2200 - DNA, 33 bp, Homo sapiens
agttcagtgtgcaagaygttttttaaggagtga

SEQ ID NO: 2201 - DNA, 33 bp, Homo sapiens
aatctaacacagctccragaattttcttctggt

SEQ ID NO: 2202 - DNA, 33 bp, Homo sapiens
tctgccatagagtgtayagagagtagcctggta

SEQ ID NO: 2203 - DNA, 33 bp, Homo sapiens
acctatcccgttgtcgyaaagcaatttatagga

SEQ ID NO: 2204 - DNA, 33 bp, Homo sapiens
acccaatttgtttttaycagttggaacactttt

SEQ ID NO: 2205 - DNA, 33 bp, Homo sapiens
tgtatttgtaagagtargtagcataaataattc

SEQ ID NO: 2206 - DNA, 33 bp, Homo sapiens
tttgagatggctcacgsacagtatgatggctcc

SEQ ID NO: 2207 - DNA, 33 bp, Homo sapiens
gcatttcttctggccaragttgtagctgatgaa

SEQ ID NO: 2208 - DNA, 33 bp, Homo sapiens
tcagaactacaggacayaattaacatcatgaac

SEQ ID NO: 2209 - DNA, 33 bp, Homo sapiens
ttcaaaaaaagtgtacyatttccatctgatcag

SEQ ID NO: 2210 - DNA, 33 bp, Homo sapiens
agactgtatggctgtamatataggcaacgtttg

SEQ ID NO: 2211 - DNA, 33 bp, Homo sapiens
acagggttcaaacaacyggctacgtctgagtgg

SEQ ID NO: 2212 - DNA, 33 bp, Homo sapiens
gaggccttctgtatccygactgtgctggtgatt

SEQ ID NO: 2213 - DNA, 33 bp, Homo sapiens
agtgacaaggtctgcaycttaaaagttctcatt

SEQ ID NO: 2214 - DNA, 33 bp, Homo sapiens
agtataattccagctawgaagacagatacattg

SEQ ID NO: 2215 - DNA, 33 bp, Homo sapiens
ttttttttagggtcacmaatcaggagcaaattt

SEQ ID NO: 2216 - DNA, 33 bp, Homo sapiens
ctcaaatcttccttccyacatccttaaaaatct

SEQ ID NO: 2217 - DNA, 33 bp, Homo sapiens
taatttcaggtttgacraaatgtaacaaatcaa

SEQ ID NO: 2218 - DNA, 33 bp, Homo sapiens
tgacacacagactgtaygtgagcaacacttaaa

SEQ ID NO: 2219 - DNA, 33 bp, Homo sapiens
tggaggggactgttgargagaagaaagggtcac

SEQ ID NO: 2220 - DNA, 33 bp, Homo sapiens
gtactcttatcaggcargacatttccatggcct

SEQ ID NO: 2221 - DNA, 33 bp, Homo sapiens
attgggaagatgtgaarccctgggaacccacat

SEQ ID NO: 2222 - DNA, 33 bp, Homo sapiens
tagaaatatctcaaaawtggagagcaaaggaga

SEQ ID NO: 2223 - DNA, 33 bp, Homo sapiens
cagattgctgaacttcrcaaaggctagagagct

SEQ ID NO: 2224 - DNA, 33 bp, Homo sapiens
tttagcacaatgtttarcaaagacttcattaat

SEQ ID NO: 2225 - DNA, 33 bp, Homo sapiens
atggcaaagttgaataracagagagtgaatgat

SEQ ID NO: 2226 - DNA, 33 bp, Homo sapiens
gtctagaactacagacrcggtaatcatgtgcct

SEQ ID NO: 2227 - DNA, 33 bp, Homo sapiens
agttaaaatatgctgaygcccctgcatggccag

SEQ ID NO: 2228 - DNA, 33 bp, Homo sapiens
cagttattaaaaagccraaggaattaagaagaa

SEQ ID NO: 2229 - DNA, 33 bp, Homo sapiens
cttcactagctagacgwccaagcagttatgacc

SEQ ID NO: 2230 - DNA, 33 bp, Homo sapiens
tgccactatagcctatyacgcaaaaaatgtaag

SEQ ID NO: 2231 - DNA, 33 bp, Homo sapiens
gagttgtcaaagaggastcacagcagaggaaaa

SEQ ID NO: 2232 - DNA, 33 bp, Homo sapiens
ctactgcttacttgaakgtgcctgacaaaccca

SEQ ID NO: 2233 - DNA, 33 bp, Homo sapiens
taagcacaatattgaastataaaagacatcttg

SEQ ID NO: 2234 - DNA, 33 bp, Homo sapiens
atgcaacattttctcartaaagatgattttcct

SEQ ID NO: 2235 - DNA, 33 bp, Homo sapiens
gaaaacagactcattcrccaacaaataatggat

SEQ ID NO: 2236 - DNA, 33 bp, Homo sapiens
ttttgggagtgcaaatraagtttccttgaagta

SEQ ID NO: 2237 - DNA, 33 bp, Homo sapiens
atggttccaagttgccmacaacaaatgtcgcac

SEQ ID NO: 2238 - DNA, 33 bp, Homo sapiens
gttacaaagtctcaccrgatgtgggatgtcagg

SEQ ID NO: 2239 - DNA, 33 bp, Homo sapiens
gcagtttgagaccggakattctcccagatttag

SEQ ID NO: 2240 - DNA, 33 bp, Homo sapiens
tactaggtgatatacasatattccaaagactga

SEQ ID NO: 2241 - DNA, 33 bp, Homo sapiens
gggcgggtgaggatgcwcttccctttttcacga

SEQ ID NO: 2242 - DNA, 33 bp, Homo sapiens
attatatgcaactttcrcaatctgcaatggaca

SEQ ID NO: 2243 - DNA, 33 bp, Homo sapiens
atcagtgacaacatcartccagagtgtagtaat

SEQ ID NO: 2244 - DNA, 33 bp, Homo sapiens
tgctaagtgtgctctcrcgaccagtccatccag

SEQ ID NO: 2245 - DNA, 33 bp, Homo sapiens
tggttttcagcactacwcttcctaagtaatgtt

SEQ ID NO: 2246 - DNA, 33 bp, Homo sapiens
tgcaaggtcagtgcatsaaccgctaagaaggtc

SEQ ID NO: 2247 - DNA, 33 bp, Homo sapiens
attgctgatgatgcaasggccttccaagtcatg

SEQ ID NO: 2248 - DNA, 33 bp, Homo sapiens
ttcaggaaccagatgaygtactcaaatgcaatc

SEQ ID NO: 2249 - DNA, 33 bp, Homo sapiens
tgtgtttgtgtgtgcawccaatacctcagagtc

SEQ ID NO: 2250 - DNA, 33 bp, Homo sapiens
cagaggggaaagcacartagacaaggtcagcct

SEQ ID NO: 2251 - DNA, 33 bp, Homo sapiens
cctattctgctgtgcaytaacactataattctc

SEQ ID NO: 2252 - DNA, 33 bp, Homo sapiens
ttttaaaatgtgcctaygtccttccaactgtat

SEQ ID NO: 2253 - DNA, 33 bp, Homo sapiens
tcatctctctatccccygaaacaaacatttgag

SEQ ID NO: 2254 - DNA, 33 bp, Homo sapiens
tagcttcagccatgtgratgaaataaaggaatt

SEQ ID NO: 2255 - DNA, 33 bp, Homo sapiens
tatgagattgagtacamcagcaactaaagggac

SEQ ID NO: 2256 - DNA, 33 bp, Homo sapiens
agcaatcaagtggagakaaattatcgatgtcag

SEQ ID NO: 2257 - DNA, 33 bp, Homo sapiens
tatgagaagaccaggartccatttcaaattaat

SEQ ID NO: 2258 - DNA, 33 bp, Homo sapiens
gcttcactttccacaaytgaagttactcatggt

SEQ ID NO: 2259 - DNA, 33 bp, Homo sapiens
tctgctacatctttgasatatggccattgaacc

SEQ ID NO: 2260 - DNA, 33 bp, Homo sapiens
aggatgagagtttagamacaagacaagcgcatc

SEQ ID NO: 2261 - DNA, 33 bp, Homo sapiens
ccttttcagttcctacrcaactgtctttgagtt

SEQ ID NO: 2262 - DNA, 33 bp, Homo sapiens
atatcttgtgcaggaaragaaataagttgttga

SEQ ID NO: 2263 - DNA, 33 bp, Homo sapiens
tgagggtgtgtctgcasaaaactcggatctggt

SEQ ID NO: 2264 - DNA, 33 bp, Homo sapiens
agcctgaccacaaagawgttgctctttctgcaa

SEQ ID NO: 2265 - DNA, 33 bp, Homo sapiens
aataggaaagtagccartgcacattactgaagg

SEQ ID NO: 2266 - DNA, 33 bp, Homo sapiens
gaaacagtgggcatagrcagagcagtttcaggc

SEQ ID NO: 2267 - DNA, 33 bp, Homo sapiens
agtgctcgattataaartatgatgatgatgatt

SEQ ID NO: 2268 - DNA, 33 bp, Homo sapiens
ctggggtagaaggagcrcaaaataaaccaaaac

SEQ ID NO: 2269 - DNA, 33 bp, Homo sapiens
taatctctatttcatayccttaacaggcaccat

SEQ ID NO: 2270 - DNA, 33 bp, Homo sapiens
gtaaaacctaaaggaawaaagcaatgaggcaaa

SEQ ID NO: 2271 - DNA, 33 bp, Homo sapiens
taccaaaattcacacargaagatatagataata

SEQ ID NO: 2272 - DNA, 33 bp, Homo sapiens
ctccttcaagtagtcgrtaattggacctgattc

SEQ ID NO: 2273 - DNA, 33 bp, Homo sapiens
ggatgaagtgagataayggcaggatagatatag

SEQ ID NO: 2274 - DNA, 33 bp, Homo sapiens
gggagggtgataaaaakgaccctgttctactca

SEQ ID NO: 2275 - DNA, 33 bp, Homo sapiens
ctaattaaaattaagcrccaatgaataaataaa

SEQ ID NO: 2276 - DNA, 33 bp, Homo sapiens
tttccagatacagagakagtttgcagaatggtg

SEQ ID NO: 2277 - DNA, 33 bp, Homo sapiens
atgtctcattttgctcyctttgcatattgccct

SEQ ID NO: 2278 - DNA, 33 bp, Homo sapiens
tttggaatccctaatasagcttaaatcacatta

SEQ ID NO: 2279 - DNA, 33 bp, Homo sapiens
ggataaattgctttcaygattagctcaccttct

SEQ ID NO: 2280 - DNA, 33 bp, Homo sapiens
tgatggaactgtctacyagctacatagggatat

SEQ ID NO: 2281 - DNA, 33 bp, Homo sapiens
gtatactcaatgcttgyaacttgttttaaactc

SEQ ID NO: 2282 - DNA, 33 bp, Homo sapiens
cactctaatgcacatgsacaataggcaaggcag

SEQ ID NO: 2283 - DNA, 33 bp, Homo sapiens
gttatgttttgctgcarattaaatcattcccca

SEQ ID NO: 2284 - DNA, 33 bp, Homo sapiens
gtggggaggtaacataycatcatattgctaata

SEQ ID NO: 2285 - DNA, 33 bp, Homo sapiens
atggtaagttatatgcrcctctgaatttagtgc

SEQ ID NO: 2286 - DNA, 33 bp, Homo sapiens
tggtgttttctcatcamagatctgttcaaatta

SEQ ID NO: 2287 - DNA, 33 bp, Homo sapiens
acacagttgctgagtckgaagagggggaaagct

SEQ ID NO: 2288 - DNA, 33 bp, Homo sapiens
ttagaaaccagccacarcatttgggcactccac

SEQ ID NO: 2289 - DNA, 33 bp, Homo sapiens
gcctgttttctacttayagcacatcacgattca

SEQ ID NO: 2290 - DNA, 33 bp, Homo sapiens
gaaaacgatttctttcsagtcctgaaataagtc

SEQ ID NO: 2291 - DNA, 33 bp, Homo sapiens
ataacgttagttgggamtcaagcaacagaaaat

SEQ ID NO: 2292 - DNA, 33 bp, Homo sapiens
tggaattaggtatggarggagagtgtaatatca

SEQ ID NO: 2293 - DNA, 33 bp, Homo sapiens
ctaactaaaatgttctyaacgcactaaatgaaa

SEQ ID NO: 2294 - DNA, 33 bp, Homo sapiens
aaggcagttacttgcayggctcagctttcagct

SEQ ID NO: 2295 - DNA, 33 bp, Homo sapiens
accagctaagtaacagrcaaacagatcaatgga

SEQ ID NO: 2296 - DNA, 33 bp, Homo sapiens
gcatatcctgaagttamcacaaaagcattgaaa

SEQ ID NO: 2297 - DNA, 33 bp, Homo sapiens
gttatgtatcacttaakgacagagacacattat

SEQ ID NO: 2298 - DNA, 33 bp, Homo sapiens
ccgccacctatttttgwataagccagctgaatc

SEQ ID NO: 2299 - DNA, 33 bp, Homo sapiens
tttttaaagtcaatacratggaaatcaataaat

SEQ ID NO: 2300 - DNA, 33 bp, Homo sapiens
ttggctattatttggcyaattcaaaatatccag

SEQ ID NO: 2301 - DNA, 33 bp, Homo sapiens
taacaagcaacgtgtayattttgctctactaca

SEQ ID NO: 2302 - DNA, 33 bp, Homo sapiens
ttctgggcatatagaargattaaactcctagtc

SEQ ID NO: 2303 - DNA, 33 bp, Homo sapiens
atccatgttcaagatayaggccagccctctaag

SEQ ID NO: 2304 - DNA, 33 bp, Homo sapiens
tgctgaacaaaataatmaccgtctcaaaaataa

SEQ ID NO: 2305 - DNA, 33 bp, Homo sapiens
gttctctcccagtccaktcagcaaagttaagag

SEQ ID NO: 2306 - DNA, 33 bp, Homo sapiens
gtccagtccggcgataygcttgtcgcttgtatt

SEQ ID NO: 2307 - DNA, 33 bp, Homo sapiens
acacgaagagaagttasataagattggcaaagt

SEQ ID NO: 2308 - DNA, 33 bp, Homo sapiens
gttcttacgtgttcacycaacggcacgttgacc

SEQ ID NO: 2309 - DNA, 33 bp, Homo sapiens
tgtaaatgtgcatccargctgatatttggtcca

SEQ ID NO: 2310 - DNA, 33 bp, Homo sapiens
caccttaattggattcyactgaaatagccatcc

SEQ ID NO: 2311 - DNA, 33 bp, Homo sapiens
ctgaattcaaatcacartcttctgtcaactgaa

SEQ ID NO: 2312 - DNA, 33 bp, Homo sapiens
aaatgtcccttgacaartagactgtccctgtta

SEQ ID NO: 2313 - DNA, 33 bp, Homo sapiens
gaatgattagcagatayggcagtggaattaagt

SEQ ID NO: 2314 - DNA, 33 bp, Homo sapiens
ggatgcccagtgcattkaaaatcgaaactctta

SEQ ID NO: 2315 - DNA, 33 bp, Homo sapiens
cctcgggcaagccccayaagcactgtgaatatg

SEQ ID NO: 2316 - DNA, 33 bp, Homo sapiens
gggagactcacagcgaygatgagagaataaatt

SEQ ID NO: 2317 - DNA, 33 bp, Homo sapiens
caactgttaagtggaaygtaataatacagggat

SEQ ID NO: 2318 - DNA, 33 bp, Homo sapiens
cataaaagttgacttakagcatctgtgtgtcct

SEQ ID NO: 2319 - DNA, 33 bp, Homo sapiens
ctctgctagttgtccaygtttttattgaaagtt

SEQ ID NO: 2320 - DNA, 33 bp, Homo sapiens
aagtagtgcctgattayagctacacactatagc

SEQ ID NO: 2321 - DNA, 33 bp, Homo sapiens
cggtagtcttgtcatgkatttcaattttctatg

SEQ ID NO: 2322 - DNA, 33 bp, Homo sapiens
agaaatgtttgttgaargtccatgtccctactt

SEQ ID NO: 2323 - DNA, 33 bp, Homo sapiens
ttattaagcagaacagrcgacctttactctttc

SEQ ID NO: 2324 - DNA, 33 bp, Homo sapiens
gtgagaaatcagccaamgaggttgatcgagtgg

SEQ ID NO: 2325 - DNA, 33 bp, Homo sapiens
cccaagacatctcgcaygtgcaaacaccatgca

SEQ ID NO: 2326 - DNA, 33 bp, Homo sapiens
cccctaacatttgactyaacaacacattccatg

SEQ ID NO: 2327 - DNA, 33 bp, Homo sapiens
actggtttggaattcayagtcacaatttcttgc

SEQ ID NO: 2328 - DNA, 33 bp, Homo sapiens
acgttttgtttattcawtcccatccatgtgcat

SEQ ID NO: 2329 - DNA, 33 bp, Homo sapiens
tcaaagtcccacaaatsatgaggttttccagtc

SEQ ID NO: 2330 - DNA, 33 bp, Homo sapiens
ttaactcgagtgggcakaaatgacagcagatgg

SEQ ID NO: 2331 - DNA, 33 bp, Homo sapiens
cattcctgtgaagtacratgcactcccagggct

SEQ ID NO: 2332 - DNA, 33 bp, Homo sapiens
cccatgctgctgtaaayggttagaataaaagcc

SEQ ID NO: 2333 - DNA, 33 bp, Homo sapiens
aacacgttcacatttaygtctcacttgaagcag

SEQ ID NO: 2334 - DNA, 33 bp, Homo sapiens
tcccaccctctgtgagsctatgaggtgccattt

SEQ ID NO: 2335 - DNA, 33 bp, Homo sapiens
aatctgctttgaaatgyacagtggattggggcc

SEQ ID NO: 2336 - DNA, 33 bp, Homo sapiens
acaataactcatggacratggcctagctggtta

SEQ ID NO: 2337 - DNA, 33 bp, Homo sapiens
aaaagtagttctaaaayttgcttccttttgtta

SEQ ID NO: 2338 - DNA, 33 bp, Homo sapiens
cagtcagttgaatcaayagtcataaagttgagt

SEQ ID NO: 2339 - DNA, 33 bp, Homo sapiens
aattttcctgtgcactraaagaagcagacatat

SEQ ID NO: 2340 - DNA, 33 bp, Homo sapiens
ccaggagtatgcaagcyatgttattgaaagaaa

SEQ ID NO: 2341 - DNA, 33 bp, Homo sapiens
acaacagaaaagtacawaagaatttgccagagg

SEQ ID NO: 2342 - DNA, 33 bp, Homo sapiens
agctactgttattttakgatagcacacttccct

SEQ ID NO: 2343 - DNA, 33 bp, Homo sapiens
caatgcaaggcaattarcactcctcttgtgtca

SEQ ID NO: 2344 - DNA, 33 bp, Homo sapiens
caatggccatagggacmggtgcacactcctgaa

SEQ ID NO: 2345 - DNA, 33 bp, Homo sapiens
caaagtcaaacacagamcagaatgagagaataa

SEQ ID NO: 2346 - DNA, 33 bp, Homo sapiens
aaccaaccaaacaaacmaacctggtatcttggg

SEQ ID NO: 2347 - DNA, 33 bp, Homo sapiens
gataaagatctgcatcraaatctcagttctgcc

SEQ ID NO: 2348 - DNA, 33 bp, Homo sapiens
cacatttgctttaaatsaggacatgtttttctc

SEQ ID NO: 2349 - DNA, 33 bp, Homo sapiens
tccttggataaaaatcyagtgagatggtttcag

SEQ ID NO: 2350 - DNA, 33 bp, Homo sapiens
agcttgctctagatcayggaagtcaaagctttc

SEQ ID NO: 2351 - DNA, 33 bp, Homo sapiens
gttttactatgacacartagaggtattattaga

SEQ ID NO: 2352 - DNA, 33 bp, Homo sapiens
atggatttagcttggcycatcaatattttaaag

SEQ ID NO: 2353 - DNA, 33 bp, Homo sapiens
catactaattccttgcycaccattttcctgtgt

SEQ ID NO: 2354 - DNA, 33 bp, Homo sapiens
tttactcctctttggcyacagttgatgggggac

SEQ ID NO: 2355 - DNA, 33 bp, Homo sapiens
aatccctagaggaagasgacaagataatcaaga

SEQ ID NO: 2356 - DNA, 33 bp, Homo sapiens
cagttggcagtaagagyatcatcacagttttct

SEQ ID NO: 2357 - DNA, 33 bp, Homo sapiens
taagaggttatgacccmaaaatgaacacaaacc

SEQ ID NO: 2358 - DNA, 33 bp, Homo sapiens
tctctcttcctaaatgyagtacctgatgcttac

SEQ ID NO: 2359 - DNA, 33 bp, Homo sapiens
aaatgagagatgccacracatataggacaacta

SEQ ID NO: 2360 - DNA, 33 bp, Homo sapiens
agcattcccggcaacaygatgcacggcccattt

SEQ ID NO: 2361 - DNA, 33 bp, Homo sapiens
gagtcagagccatatcyatccttcgggcagcac

SEQ ID NO: 2362 - DNA, 33 bp, Homo sapiens
ctcaaggctctagacaygaagaattggaaaagg

SEQ ID NO: 2363 - DNA, 33 bp, Homo sapiens
gaattcaggtccaaagkcttcctctctcattgg

SEQ ID NO: 2364 - DNA, 33 bp, Homo sapiens
ttctacacgatgcaatkaaggcttactgccatt

SEQ ID NO: 2365 - DNA, 33 bp, Homo sapiens
ccttgtcttcatccaartatttcttttcgcttt

SEQ ID NO: 2366 - DNA, 33 bp, Homo sapiens
ttaccctttccctgagwaacattgtacatatcc

SEQ ID NO: 2367 - DNA, 33 bp, Homo sapiens
agattacactcccacargtgcacgttgcagctc

SEQ ID NO: 2368 - DNA, 33 bp, Homo sapiens
tctgagcattcttaagwcactctagcgaggcca

SEQ ID NO: 2369 - DNA, 33 bp, Homo sapiens
agtccatttgtgtacartcagaacctttcaacc

SEQ ID NO: 2370 - DNA, 33 bp, Homo sapiens
gactttcattcatttaycagatccaacattgag

SEQ ID NO: 2371 - DNA, 33 bp, Homo sapiens
gattaaatttgtaaaaytgccttgttactgtct

SEQ ID NO: 2372 - DNA, 33 bp, Homo sapiens
cacaagggctgaccccragttgttttcattctg

SEQ ID NO: 2373 - DNA, 33 bp, Homo sapiens
ttgtcaccactactagraattaattgcaaagaa

SEQ ID NO: 2374 - DNA, 33 bp, Homo sapiens
ggcaagctcaaacatcragccttgaaggcagag

SEQ ID NO: 2375 - DNA, 33 bp, Homo sapiens
gagccatgctctgaccragaaatatctttcctc

SEQ ID NO: 2376 - DNA, 33 bp, Homo sapiens
aagctggttattgccargcctattaacacttaa

SEQ ID NO: 2377 - DNA, 33 bp, Homo sapiens
cagaaccctcaccaaayaagtggtaaatattgt

SEQ ID NO: 2378 - DNA, 33 bp, Homo sapiens
acaggtcggggctgaartagtagacaggccttt

SEQ ID NO: 2379 - DNA, 33 bp, Homo sapiens
agtagggatggctccaytacacattggaggttg

SEQ ID NO: 2380 - DNA, 33 bp, Homo sapiens
ttcatagtctacctaawtgattccccagaatta

SEQ ID NO: 2381 - DNA, 33 bp, Homo sapiens
agcatgagtccttgcartaatctttccaatata

SEQ ID NO: 2382 - DNA, 33 bp, Homo sapiens
ctttctgtgaatggaarctccatggcttaggaa

SEQ ID NO: 2383 - DNA, 33 bp, Homo sapiens
gattgctggtacagagraattgtaaagccccac

SEQ ID NO: 2384 - DNA, 33 bp, Homo sapiens
tttaacacaggcagccraagagatgtcaccaag

SEQ ID NO: 2385 - DNA, 33 bp, Homo sapiens
catatgctttacaagaytcatggattaataaaa

SEQ ID NO: 2386 - DNA, 33 bp, Homo sapiens
tactgcacatgtttgakactctcactctacctg

SEQ ID NO: 2387 - DNA, 33 bp, Homo sapiens
aaatccttttcatgccwctatggaatgtcccat

SEQ ID NO: 2388 - DNA, 33 bp, Homo sapiens
agatgagaaggtgctcrcatggagcgtccgggc

SEQ ID NO: 2389 - DNA, 33 bp, Homo sapiens
tctcctttagcagttamcactcttgctcttgta

SEQ ID NO: 2390 - DNA, 33 bp, Homo sapiens
ctgtgactaagctgtgsagaggttgacagcagg

SEQ ID NO: 2391 - DNA, 33 bp, Homo sapiens
aataaacgacaaaaagkagtcagaacaatactt

SEQ ID NO: 2392 - DNA, 33 bp, Homo sapiens
ctctctttcatccatgyaacattatagccatta

SEQ ID NO: 2393 - DNA, 33 bp, Homo sapiens
ctcttccgcttgtcccraagtcagggctggcaa

SEQ ID NO: 2394 - DNA, 33 bp, Homo sapiens
ttaattcttcttacagrccaagtagcacgttta

SEQ ID NO: 2395 - DNA, 33 bp, Homo sapiens
ctttccaacaggtgcartcaagtcatccgtgta

SEQ ID NO: 2396 - DNA, 33 bp, Homo sapiens
tgtcaatgaaacacacsagagaattcgaagtct

SEQ ID NO: 2397 - DNA, 33 bp, Homo sapiens
ctgaagttctcattaamtatgtcaaaacatatt

SEQ ID NO: 2398 - DNA, 33 bp, Homo sapiens
tatagaggatgaagcasgtttaaaaattggaca

SEQ ID NO: 2399 - DNA, 33 bp, Homo sapiens
aggccattttacagcamactatggtccttaatc

SEQ ID NO: 2400 - DNA, 33 bp, Homo sapiens
tatactcactaaaatcraatcaattatacaact

SEQ ID NO: 2401 - DNA, 33 bp, Homo sapiens
tcaatggaaactgaccycaaagacactaaaaga

SEQ ID NO: 2402 - DNA, 33 bp, Homo sapiens
ctgtaccctcatgatamctaagtctagaagcca

SEQ ID NO: 2403 - DNA, 33 bp, Homo sapiens
ggctgtgcaaggtatgrattgaaggttattttg

SEQ ID NO: 2404 - DNA, 33 bp, Homo sapiens
catgatgtcctaacaarcaaattatcactttaa

SEQ ID NO: 2405 - DNA, 33 bp, Homo sapiens
cacctgaaaaactgtaraagtgagcatggcagg

SEQ ID NO: 2406 - DNA, 33 bp, Homo sapiens
gtaagcaataaaaaaawgtctgctgttgccagt

SEQ ID NO: 2407 - DNA, 33 bp, Homo sapiens
ccccagcatgtcccgcraagtgcttttcatgtg

SEQ ID NO: 2408 - DNA, 33 bp, Homo sapiens
ctttcttgcatacaaamccttcactaataaggt

SEQ ID NO: 2409 - DNA, 33 bp, Homo sapiens
tatctgttttacaccartgaaaagtagatgcca

SEQ ID NO: 2410 - DNA, 33 bp, Homo sapiens
ttaaagggaccacaaaygctgggtcagtggaca

SEQ ID NO: 2411 - DNA, 33 bp, Homo sapiens
cactatatagctggcamccaaatttacagagat

SEQ ID NO: 2412 - DNA, 33 bp, Homo sapiens
agttattgaatgtctcscaatgtctcattgtgc

SEQ ID NO: 2413 - DNA, 33 bp, Homo sapiens
cctcagctgtaagacaygatgaatgaggaagga

SEQ ID NO: 2414 - DNA, 33 bp, Homo sapiens
atactgattggataaaygaacaattcgacacac

SEQ ID NO: 2415 - DNA, 33 bp, Homo sapiens
agacatagtgggcttaygtgaaaaacacccaac

SEQ ID NO: 2416 - DNA, 33 bp, Homo sapiens
tgattctgcctctggamaggtctcttaattcct

SEQ ID NO: 2417 - DNA, 33 bp, Homo sapiens
ttttagtacatctccaractctcaaacacagac

SEQ ID NO: 2418 - DNA, 33 bp, Homo sapiens
atataaaaaagctctayggcagtaatttgctag

SEQ ID NO: 2419 - DNA, 33 bp, Homo sapiens
tgggatggccgacctayaggaaggactccttgg

SEQ ID NO: 2420 - DNA, 33 bp, Homo sapiens
aatacattactcacaarttacagaaagcatcta

SEQ ID NO: 2421 - DNA, 33 bp, Homo sapiens
gaaaactagattaaaartgccatgaggatttag

SEQ ID NO: 2422 - DNA, 33 bp, Homo sapiens
ccttgtgtggcaagacyaatgagtatgctcgtg

SEQ ID NO: 2423 - DNA, 33 bp, Homo sapiens
caaattggtaaagagtsaaactgtcgctgtttg

SEQ ID NO: 2424 - DNA, 33 bp, Homo sapiens
tccctgtttgatgtcaygaagccaatatatgga

SEQ ID NO: 2425 - DNA, 33 bp, Homo sapiens
taccctgtgttaaagaygtttgcccctacatcc

SEQ ID NO: 2426 - DNA, 33 bp, Homo sapiens
tagagtgtacaaagacrggggatttccttactg

SEQ ID NO: 2427 - DNA, 33 bp, Homo sapiens
actgtggctgaaatccrgcttcaggaccaaccg

SEQ ID NO: 2428 - DNA, 33 bp, Homo sapiens
caactatttaactgtayctttgtcgtacaaaaa

SEQ ID NO: 2429 - DNA, 33 bp, Homo sapiens
atggggaagtcttgggmagataactcaatgccc

SEQ ID NO: 2430 - DNA, 33 bp, Homo sapiens
actctcttgaatagtgraaatgttttacatctg

SEQ ID NO: 2431 - DNA, 33 bp, Homo sapiens
ctcttttaggtgttccmattgctttccaaagtt

SEQ ID NO: 2432 - DNA, 33 bp, Homo sapiens
ttgggcttaaaattcasattgtgtggtataatt

SEQ ID NO: 2433 - DNA, 33 bp, Homo sapiens
tttaacaaactgatagrcaaacttaattttgga

SEQ ID NO: 2434 - DNA, 33 bp, Homo sapiens
gagatctgattgaagargaaaccatagcacaac

SEQ ID NO: 2435 - DNA, 33 bp, Homo sapiens
tgtgatccaatttttcratacgttgggcaagaa

SEQ ID NO: 2436 - DNA, 33 bp, Homo sapiens
ctattagttactttccmgactctcttcctcctc

SEQ ID NO: 2437 - DNA, 33 bp, Homo sapiens
taaacactctcatggarcatcagtgtcagacca

SEQ ID NO: 2438 - DNA, 33 bp, Homo sapiens
acctgcgtgaagctgcraggaccatgcctgatg

SEQ ID NO: 2439 - DNA, 33 bp, Homo sapiens
ttatttgaaaattataratgactgaggaaagtg

SEQ ID NO: 2440 - DNA, 33 bp, Homo sapiens
gttttcatcagtataaygggaacgatcatggta

SEQ ID NO: 2441 - DNA, 33 bp, Homo sapiens
cttcttaccacttctcraatgagcatcacgttg

SEQ ID NO: 2442 - DNA, 33 bp, Homo sapiens
tgtgaaaagagaagagycatttcattttaactt

SEQ ID NO: 2443 - DNA, 33 bp, Homo sapiens
ccattgatctttagcayctttgtctaaaattaa

SEQ ID NO: 2444 - DNA, 33 bp, Homo sapiens
gagtgttacgtgctccraactccccatgctaga

SEQ ID NO: 2445 - DNA, 33 bp, Homo sapiens
agggagggtcagaatgycatagcctccagctgc

SEQ ID NO: 2446 - DNA, 33 bp, Homo sapiens
atgtaaaatctggaacygaaccatagcaatggc

SEQ ID NO: 2447 - DNA, 33 bp, Homo sapiens
gcagccctaagagccaygatcttccagtttgat

SEQ ID NO: 2448 - DNA, 33 bp, Homo sapiens
tttaggactactacacscataataggcatttag

SEQ ID NO: 2449 - DNA, 33 bp, Homo sapiens
gaaatgtgattataccrcaatcagagctgagag

SEQ ID NO: 2450 - DNA, 33 bp, Homo sapiens
cagagtcttctcaaacmaaatttgcattccagg

SEQ ID NO: 2451 - DNA, 33 bp, Homo sapiens
acccatacctgatttaratgaagagatttggga

SEQ ID NO: 2452 - DNA, 33 bp, Homo sapiens
tataacaacgtagtgaratagaagttatgtgaa

SEQ ID NO: 2453 - DNA, 33 bp, Homo sapiens
acagaaaacttttgggraatcctgctttaaggc

SEQ ID NO: 2454 - DNA, 33 bp, Homo sapiens
tttgagcacttttgcaytgagaaaaacaacaat

SEQ ID NO: 2455 - DNA, 33 bp, Homo sapiens
cctatcaatattgcaakcctatttttaagcctg

SEQ ID NO: 2456 - DNA, 33 bp, Homo sapiens
gcctggttcagattcargaggtgaggaatcagt

SEQ ID NO: 2457 - DNA, 33 bp, Homo sapiens
aagataatgataagaaygatgactaatcttaac

SEQ ID NO: 2458 - DNA, 33 bp, Homo sapiens
gctcatccatctctcargtgggggtcctccggc

SEQ ID NO: 2459 - DNA, 33 bp, Homo sapiens
tcctcatgatcttgcasgacttacaaattagca

SEQ ID NO: 2460 - DNA, 33 bp, Homo sapiens
acttttgctcatactayctattcaatcactggt

SEQ ID NO: 2461 - DNA, 33 bp, Homo sapiens
ctctgtatcctcacaaygactaggccccagctc

SEQ ID NO: 2462 - DNA, 33 bp, Homo sapiens
ccttggaccaactcgcmcaggaaagatgaagtc

SEQ ID NO: 2463 - DNA, 33 bp, Homo sapiens
atcaaattcgatcagayccaaccccaaaggtgg

SEQ ID NO: 2464 - DNA, 33 bp, Homo sapiens
actgactcttttgaacraaacatgcacaataga

SEQ ID NO: 2465 - DNA, 33 bp, Homo sapiens
tctgtccagcaactcawccatcaggtttgaaac

SEQ ID NO: 2466 - DNA, 33 bp, Homo sapiens
catatgggcatgatgckgagttttgatgatcca

SEQ ID NO: 2467 - DNA, 33 bp, Homo sapiens
tcactctgggctttacraaatcatacagaccta

SEQ ID NO: 2468 - DNA, 33 bp, Homo sapiens
aaatcatattccaaatragcatcaaaaataata

SEQ ID NO: 2469 - DNA, 33 bp, Homo sapiens
gtttctcttaaatcaaragtatgtacctgacat

SEQ ID NO: 2470 - DNA, 33 bp, Homo sapiens
aggaatttgaggtaagmcaatcaggtaaagttc

SEQ ID NO: 2471 - DNA, 33 bp, Homo sapiens
agactccttaattaaasactgtacttacagcag

SEQ ID NO: 2472 - DNA, 33 bp, Homo sapiens
cttcagaactatgaacyagataaacttttatta

SEQ ID NO: 2473 - DNA, 33 bp, Homo sapiens
cactttatggcacagarcttgcattgctaccct

SEQ ID NO: 2474 - DNA, 33 bp, Homo sapiens
aggaaatgtagtttcasgaaaggaatttgacac

SEQ ID NO: 2475 - DNA, 33 bp, Homo sapiens
tgtaggattttcgggcmaaatgtgggaaaacag

SEQ ID NO: 2476 - DNA, 33 bp, Homo sapiens
tttcagacatggttgtmaagagtcagctccttg

SEQ ID NO: 2477 - DNA, 33 bp, Homo sapiens
tgttactttgagtcgayagcctcattcacgaca

SEQ ID NO: 2478 - DNA, 33 bp, Homo sapiens
ttgatgctataggatgrattcctttggctcatg

SEQ ID NO: 2479 - DNA, 33 bp, Homo sapiens
aatgtgttatcaagcaygcaatcactatgggag

SEQ ID NO: 2480 - DNA, 33 bp, Homo sapiens
aaggtgacattggagcsaagacttgaaggagat

SEQ ID NO: 2481 - DNA, 33 bp, Homo sapiens
taaaacattgtcaaaarttagtagaagtccacc

SEQ ID NO: 2482 - DNA, 33 bp, Homo sapiens
gtagaattcaaggcatraagtaaagagacaata

SEQ ID NO: 2483 - DNA, 33 bp, Homo sapiens
agatgtcagtgcaatayaagcccgaaagcaagt

SEQ ID NO: 2484 - DNA, 33 bp, Homo sapiens
tacagcctccacaggawaagacggatggaaggt

SEQ ID NO: 2485 - DNA, 33 bp, Homo sapiens
agatttgacatagtaastggcactaacccagct

SEQ ID NO: 2486 - DNA, 33 bp, Homo sapiens
actataaaaattcttgraaacaatctaggaaat

SEQ ID NO: 2487 - DNA, 33 bp, Homo sapiens
catttgcaacatcatargtgaaactggaagtca

SEQ ID NO: 2488 - DNA, 33 bp, Homo sapiens
gtacaaggcagtcaaayctgttgacctgctggc

SEQ ID NO: 2489 - DNA, 33 bp, Homo sapiens
cagggtcggcttaagcrattcttaaacaaaatc

SEQ ID NO: 2490 - DNA, 33 bp, Homo sapiens
caacagtcacccaagayatacttactcctcaaa

SEQ ID NO: 2491 - DNA, 33 bp, Homo sapiens
gtccaacaacaacttcrgaagatgggagcacag

SEQ ID NO: 2492 - DNA, 33 bp, Homo sapiens
gttcacacagtagacastcccagaagcatgaga

SEQ ID NO: 2493 - DNA, 33 bp, Homo sapiens
gagaaagagaagaaaartcggagaaactggcca

SEQ ID NO: 2494 - DNA, 33 bp, Homo sapiens
attgattggacatagarggtaatggagagaaga

SEQ ID NO: 2495 - DNA, 33 bp, Homo sapiens
gcttttaacaaatcagkatacaacttagtattt

SEQ ID NO: 2496 - DNA, 33 bp, Homo sapiens
ccctgcactacctcaayaatataccactggctg

SEQ ID NO: 2497 - DNA, 33 bp, Homo sapiens
tcttcttgtgctttagragtcttacggcaaaaa

SEQ ID NO: 2498 - DNA, 33 bp, Homo sapiens
ctaataatgtatttggraagttgttcacatggt

SEQ ID NO: 2499 - DNA, 33 bp, Homo sapiens
tgccaaattgccctacraagctgctgcaggaat

SEQ ID NO: 2500 - DNA, 33 bp, Homo sapiens
tatttaactccctaccwagttcactgttaagaa

SEQ ID NO: 2501 - DNA, 33 bp, Homo sapiens
tttacttagtgaaccaytgcatttttgacagtt

SEQ ID NO: 2502 - DNA, 33 bp, Homo sapiens
attatctccctgatgcsaatgcctgatacaacc

SEQ ID NO: 2503 - DNA, 33 bp, Homo sapiens
gagttgtagcatccaawgaccttaattaaaatt

SEQ ID NO: 2504 - DNA, 33 bp, Homo sapiens
tatgtaactggtggtarctttgaactggtagga

SEQ ID NO: 2505 - DNA, 33 bp, Homo sapiens
agcaataataaagatgragagtatcagctaaga

SEQ ID NO: 2506 - DNA, 33 bp, Homo sapiens
agcagcttaagatccartcaaaaagacaaaata

SEQ ID NO: 2507 - DNA, 33 bp, Homo sapiens
aataacaaaaggtttayggactcagaaaggaca

SEQ ID NO: 2508 - DNA, 33 bp, Homo sapiens
tctatgttgtgtaaaaractaccctgaatctta

SEQ ID NO: 2509 - DNA, 33 bp, Homo sapiens
ctcttcctggcacaccrcataattcttttaaat

SEQ ID NO: 2510 - DNA, 33 bp, Homo sapiens
agtgcctcaaatctcartactaacgttgaatat

SEQ ID NO: 2511 - DNA, 33 bp, Homo sapiens
catgtactatggaaaamacccatcttattacat

SEQ ID NO: 2512 - DNA, 33 bp, Homo sapiens
tgtttaaacttatgcaktctttgggccagtctt

SEQ ID NO: 2513 - DNA, 33 bp, Homo sapiens
agtcactgcactaatgyaaaggcaagaagaaca

SEQ ID NO: 2514 - DNA, 33 bp, Homo sapiens
ccaaatgatctgccaaycctctgaataaccagc

SEQ ID NO: 2515 - DNA, 33 bp, Homo sapiens
acctcactgaataatargtgataagccaaataa

SEQ ID NO: 2516 - DNA, 33 bp, Homo sapiens
gctattggccaacagawgtagctttgacaacct

SEQ ID NO: 2517 - DNA, 33 bp, Homo sapiens
tttttataccgagccargcttgttatgactgtg

SEQ ID NO: 2518 - DNA, 33 bp, Homo sapiens
ctccagaccatttgtgmattcttgctctgaaca

SEQ ID NO: 2519 - DNA, 33 bp, Homo sapiens
aattgaagtcagaaaartccaatggagaatgag

SEQ ID NO: 2520 - DNA, 33 bp, Homo sapiens
aatggctccatttctawgagaggtaactaaaat

SEQ ID NO: 2521 - DNA, 33 bp, Homo sapiens
tgagtatacagaaagarattgatgaaagccaaa

SEQ ID NO: 2522 - DNA, 33 bp, Homo sapiens
aacagtaatagaacaartaagaaggtggttaca

SEQ ID NO: 2523 - DNA, 33 bp, Homo sapiens
acccttggaagagagayaagacatagtcctaaa

SEQ ID NO: 2524 - DNA, 33 bp, Homo sapiens
aacatacagactgaaamtatatctgcatattgt

SEQ ID NO: 2525 - DNA, 33 bp, Homo sapiens
tttcctgcggtaaaaamcagaaagctaacttgt

SEQ ID NO: 2526 - DNA, 33 bp, Homo sapiens
tgcttcagaacttacartggtttctcatgacct

SEQ ID NO: 2527 - DNA, 33 bp, Homo sapiens
attgagaagcacatcaytattatttgacattac

SEQ ID NO: 2528 - DNA, 33 bp, Homo sapiens
gcgatgccctcggagaygtgtggcacacaggag

SEQ ID NO: 2529 - DNA, 33 bp, Homo sapiens
aacaaaacattcatcaytcagtatccccttgtt

SEQ ID NO: 2530 - DNA, 33 bp, Homo sapiens
gaggagtcagttaataygtgtaaaagttttaga

SEQ ID NO: 2531 - DNA, 33 bp, Homo sapiens
cctggctctaaattccsccgtattttgtaatct

SEQ ID NO: 2532 - DNA, 33 bp, Homo sapiens
gaaaactggaaaaaaartttccctgctggagtg

SEQ ID NO: 2533 - DNA, 33 bp, Homo sapiens
gagaaaaagccagaackacaaccctcatcccgc

SEQ ID NO: 2534 - DNA, 33 bp, Homo sapiens
aagttgctgtatttaasaattagctaaccctgg

SEQ ID NO: 2535 - DNA, 33 bp, Homo sapiens
ccaatctgataggtgaraaaaagcagtgtactt

SEQ ID NO: 2536 - DNA, 33 bp, Homo sapiens
atgctgtgttttccacratactggtactaccgg

SEQ ID NO: 2537 - DNA, 33 bp, Homo sapiens
cctcagtggctgaagakctatgtccagggagca

SEQ ID NO: 2538 - DNA, 33 bp, Homo sapiens
gcataaggaaatcaatsaaggtgtgaagacaat

SEQ ID NO: 2539 - DNA, 33 bp, Homo sapiens
ggtacttgactccagawgactacagtgataatt

SEQ ID NO: 2540 - DNA, 33 bp, Homo sapiens
tttgcagctacatacayagggtcagagaatgtt

SEQ ID NO: 2541 - DNA, 33 bp, Homo sapiens
taatcaaaactgtatgrcactggcataaagaga

SEQ ID NO: 2542 - DNA, 33 bp, Homo sapiens
cccactactgaaggaarggggagtataccgtat

SEQ ID NO: 2543 - DNA, 33 bp, Homo sapiens
aaatgcttccagtcacrctgaactgaaatatct

SEQ ID NO: 2544 - DNA, 33 bp, Homo sapiens
taacttcagaaggcagsaccttggaggggagcc

SEQ ID NO: 2545 - DNA, 33 bp, Homo sapiens
tggccttaaggatcttsaaaatatccccttccc

SEQ ID NO: 2546 - DNA, 33 bp, Homo sapiens
ttgatgcttagaccaaraaattcttaagatgta

SEQ ID NO: 2547 - DNA, 33 bp, Homo sapiens
ggcggctctgacctccsgatgcgtttctccagg

SEQ ID NO: 2548 - DNA, 33 bp, Homo sapiens
ctgatgttgacaatgcratgggattaagaggtg

SEQ ID NO: 2549 - DNA, 33 bp, Homo sapiens
aggatgcaaatttcaamtatctgttatcccttg

SEQ ID NO: 2550 - DNA, 33 bp, Homo sapiens
ccctttgacagcaaaayctggcctttcctgaat

SEQ ID NO: 2551 - DNA, 33 bp, Homo sapiens
ttcctacctgtcagaayggcaaaggtcaaaata

SEQ ID NO: 2552 - DNA, 33 bp, Homo sapiens
cgctgctcctcatagaygtactaccaaccactg

SEQ ID NO: 2553 - DNA, 33 bp, Homo sapiens
tattctacttcgcttawcaacataagttccaat

SEQ ID NO: 2554 - DNA, 33 bp, Homo sapiens
cagtctactatatgacraaagcacaaataaact

SEQ ID NO: 2555 - DNA, 33 bp, Homo sapiens
tttgggagaaaacactragagttgacagagagg

SEQ ID NO: 2556 - DNA, 33 bp, Homo sapiens
tgagaactgatgaacasaaggaaacaatagaca

SEQ ID NO: 2557 - DNA, 33 bp, Homo sapiens
cgcaccagagaaaaacrcccagagaagtggcaa

SEQ ID NO: 2558 - DNA, 33 bp, Homo sapiens
tggctctttcaaatctwaatgacatttatggtc

SEQ ID NO: 2559 - DNA, 33 bp, Homo sapiens
tccatctcttaagccaygagaggagacagattt

SEQ ID NO: 2560 - DNA, 33 bp, Homo sapiens
ctgtttttgtttagtawtgatgccttgcagtcc

SEQ ID NO: 2561 - DNA, 33 bp, Homo sapiens
agaaggataatgaaggkcctccttaatcagagt

SEQ ID NO: 2562 - DNA, 33 bp, Homo sapiens
ccctaccttgatctacrgattcattgagctcta

SEQ ID NO: 2563 - DNA, 33 bp, Homo sapiens
tttcaatttccccgaaygagctggccttaatga

SEQ ID NO: 2564 - DNA, 33 bp, Homo sapiens
ggatgtatgatctaaayttgccgaggctcagct

SEQ ID NO: 2565 - DNA, 33 bp, Homo sapiens
atgaatctgaactttaycctgatggctctgaat

SEQ ID NO: 2566 - DNA, 33 bp, Homo sapiens
ctctaatgatgtaaaasgcctcagacatcgtta

SEQ ID NO: 2567 - DNA, 33 bp, Homo sapiens
tttaggcctagtttaascagatctttaagagac

SEQ ID NO: 2568 - DNA, 33 bp, Homo sapiens
ctaatcccagcacgagkactgcacttaaagccc

SEQ ID NO: 2569 - DNA, 33 bp, Homo sapiens
caaattgaaagctgaayccagtgattagagagg

SEQ ID NO: 2570 - DNA, 33 bp, Homo sapiens
tccccccagcccaaacygacaaaccgagatttt

SEQ ID NO: 2571 - DNA, 33 bp, Homo sapiens
catcctttgggaatgastagatcaaagtaagag

SEQ ID NO: 2572 - DNA, 33 bp, Homo sapiens
ggtagattaagtgtgcmaaaagttaaatttaaa

SEQ ID NO: 2573 - DNA, 33 bp, Homo sapiens
taaacatagcatggaaraaagctcctctttacc

SEQ ID NO: 2574 - DNA, 33 bp, Homo sapiens
acagaatgcttaaaccycatgcacttaataaaa

SEQ ID NO: 2575 - DNA, 33 bp, Homo sapiens
caaggagaacagggtaygcaggaaaggcaggtg

SEQ ID NO: 2576 - DNA, 33 bp, Homo sapiens
agatgtctgagcttcarcccggtcttgctaagt

SEQ ID NO: 2577 - DNA, 33 bp, Homo sapiens
agcagacaacgtggcayaggctttttttaaatt

SEQ ID NO: 2578 - DNA, 33 bp, Homo sapiens
ggacactaccctacccratatttgcagccattg

SEQ ID NO: 2579 - DNA, 33 bp, Homo sapiens
gaaaaactatccttcgycatggtgtcaggtaat

SEQ ID NO: 2580 - DNA, 33 bp, Homo sapiens
cacagtgcattatcaamctttttttagacgggg

SEQ ID NO: 2581 - DNA, 33 bp, Homo sapiens
tttgcagatgataaaawtgagctttatagagac

SEQ ID NO: 2582 - DNA, 33 bp, Homo sapiens
acccaactccaaatcaygttccaattgttactg

SEQ ID NO: 2583 - DNA, 33 bp, Homo sapiens
acatatttttttggagraagacaattcaatctg

SEQ ID NO: 2584 - DNA, 33 bp, Homo sapiens
cagagtgaggaagtaaygtctacagggcatttg

SEQ ID NO: 2585 - DNA, 33 bp, Homo sapiens
tgtgatccattgtatcyagctcacctgttgttt

SEQ ID NO: 2586 - DNA, 33 bp, Homo sapiens
ctccctgatttcagacrgaaggtctcacttgga

SEQ ID NO: 2587 - DNA, 33 bp, Homo sapiens
aaggctgctcatttgayggatgaattactccat

SEQ ID NO: 2588 - DNA, 33 bp, Homo sapiens
aaagcgagtcaagacargaacactaaatgatgt

SEQ ID NO: 2589 - DNA, 33 bp, Homo sapiens
caatttaccgtgtggcragaccatttcctatcc

SEQ ID NO: 2590 - DNA, 33 bp, Homo sapiens
tttcatgaaaaccaaamttgagttgttgactat

SEQ ID NO: 2591 - DNA, 33 bp, Homo sapiens
ttggtggtactctacayacatggctgcaaatag

SEQ ID NO: 2592 - DNA, 33 bp, Homo sapiens
tacgaaactgcccctamgctgctaccctctgca

SEQ ID NO: 2593 - DNA, 33 bp, Homo sapiens
cttgatcccaaaaagamctttcatcatggaact

SEQ ID NO: 2594 - DNA, 33 bp, Homo sapiens
gttgtgggtcgaacaaytaaacacctcactctg

SEQ ID NO: 2595 - DNA, 33 bp, Homo sapiens
tgctttacaaaagacaytgtcaggagaatcaag

SEQ ID NO: 2596 - DNA, 33 bp, Homo sapiens
tccactccatatcatckgaatcccaacattaaa

SEQ ID NO: 2597 - DNA, 33 bp, Homo sapiens
gaatggagccccatcaygtgcgttttaacagtc

SEQ ID NO: 2598 - DNA, 33 bp, Homo sapiens
tgcctgatacagaagasaaagttgcataggact

SEQ ID NO: 2599 - DNA, 33 bp, Homo sapiens
tgcaggccattgtaaamaagcctttagttagta

SEQ ID NO: 2600 - DNA, 33 bp, Homo sapiens
ttaggaaggctttgcaytgataggaagtaattg

SEQ ID NO: 2601 - DNA, 33 bp, Homo sapiens
ggtaggacattgcttarcttcagtgaatccaca

SEQ ID NO: 2602 - DNA, 33 bp, Homo sapiens
actttgtattcagagasattacctataagcaga

SEQ ID NO: 2603 - DNA, 33 bp, Homo sapiens
atcatctgagaaaaaartatagacccagaacaa

SEQ ID NO: 2604 - DNA, 33 bp, Homo sapiens
tttagcttgtcttaatwaagtttacgtctattt

SEQ ID NO: 2605 - DNA, 33 bp, Homo sapiens
ttataaaaacatcaggyccactggatcaagtct

SEQ ID NO: 2606 - DNA, 33 bp, Homo sapiens
ctacttaaactgccagycagtggaataaggact

SEQ ID NO: 2607 - DNA, 33 bp, Homo sapiens
ttgctctattggacacygaaatcctggggttaa

SEQ ID NO: 2608 - DNA, 33 bp, Homo sapiens
agatgctccagagtaamtgtatagaccctcccc

SEQ ID NO: 2609 - DNA, 33 bp, Homo sapiens
caatgacggcccttaaytgaagtgcacactaaa

SEQ ID NO: 2610 - DNA, 33 bp, Homo sapiens
aactcaccaaaattggkaaatagaaagcatttt

SEQ ID NO: 2611 - DNA, 33 bp, Homo sapiens
aaactgatgatgatgarggataacaataatggt

SEQ ID NO: 2612 - DNA, 33 bp, Homo sapiens
taaaccaggtttttctsactctagagaccatgt

SEQ ID NO: 2613 - DNA, 33 bp, Homo sapiens
gaatttcgatactgaarggctaaatgtacactt

SEQ ID NO: 2614 - DNA, 33 bp, Homo sapiens
gctctgatgtggccacygtgattaacgcaatca

SEQ ID NO: 2615 - DNA, 33 bp, Homo sapiens
ttctgttccacaagctmagaggaagcagaattt

SEQ ID NO: 2616 - DNA, 33 bp, Homo sapiens
aggaagtgctacttcaygtatttgtgagagttt

SEQ ID NO: 2617 - DNA, 33 bp, Homo sapiens
gtacggcagaacagggragagataaactctggt

SEQ ID NO: 2618 - DNA, 33 bp, Homo sapiens
aatagattaaaatgaaygtcagaagactatttc

SEQ ID NO: 2619 - DNA, 33 bp, Homo sapiens
gatagctgttgtataartgagaaacagggttat

SEQ ID NO: 2620 - DNA, 33 bp, Homo sapiens
ctccccatcaagcacaktcagctcataagtgaa

SEQ ID NO: 2621 - DNA, 33 bp, Homo sapiens
atgaagtacccttatcrcattacatcagtgggt

SEQ ID NO: 2622 - DNA, 33 bp, Homo sapiens
gctactaggaaaaagaraccatcttcaggctgt

SEQ ID NO: 2623 - DNA, 33 bp, Homo sapiens
gttacagacttttagarcttgtttctgtaggac

SEQ ID NO: 2624 - DNA, 33 bp, Homo sapiens
ttaggcaaatctccacraagggctgtattttcc

SEQ ID NO: 2625 - DNA, 33 bp, Homo sapiens
acgacacatgtttaaayggcattctgtgagccc

SEQ ID NO: 2626 - DNA, 33 bp, Homo sapiens
tcatctgtgaatgaagratgtcaatattcagga

SEQ ID NO: 2627 - DNA, 33 bp, Homo sapiens
ctctggtctcccacaawcctgagctgcctccag

SEQ ID NO: 2628 - DNA, 33 bp, Homo sapiens
agtggtgcctgcttacygaatctgagaaggtta

SEQ ID NO: 2629 - DNA, 33 bp, Homo sapiens
gtggtactgattgctgmaatttggtcaatgaag

SEQ ID NO: 2630 - DNA, 33 bp, Homo sapiens
aaatcctttcaaatgcraaagtttttccaaacc

SEQ ID NO: 2631 - DNA, 33 bp, Homo sapiens
gcctccagtcacacaarcctgctaatccgtgac

SEQ ID NO: 2632 - DNA, 33 bp, Homo sapiens
tctatgcattcttggcraatccctcaacatttt

SEQ ID NO: 2633 - DNA, 33 bp, Homo sapiens
aatgttatagtagtttyaaaagcatttggtcaa

SEQ ID NO: 2634 - DNA, 33 bp, Homo sapiens
ggtgatggtcccaggaragaatggtgagcagca

SEQ ID NO: 2635 - DNA, 33 bp, Homo sapiens
ttttaaatggaaaaaartatagcacttacctgt

SEQ ID NO: 2636 - DNA, 33 bp, Homo sapiens
ttctccactggtaaacwcttagtctctgtctca

SEQ ID NO: 2637 - DNA, 33 bp, Homo sapiens
tccatagaattactaarcagctcctcatagttt

SEQ ID NO: 2638 - DNA, 33 bp, Homo sapiens
tagtgtttttgtctcaygggctaatgtcaaagg

SEQ ID NO: 2639 - DNA, 33 bp, Homo sapiens
taactcctaaggaataraggcatcagccatacc

SEQ ID NO: 2640 - DNA, 33 bp, Homo sapiens
tctcttgatgctgttayaagccgcccgttttca

SEQ ID NO: 2641 - DNA, 33 bp, Homo sapiens
tagcgttttctccagargcatgataccaagcat

SEQ ID NO: 2642 - DNA, 33 bp, Homo sapiens
aggttaagtgatcaaaytgtaaatacatcccaa

SEQ ID NO: 2643 - DNA, 33 bp, Homo sapiens
agccttacctgaagaarggtgtgcagtatgcat

SEQ ID NO: 2644 - DNA, 33 bp, Homo sapiens
gcgtgaccaggtagaaytagcctcagcatggaa

SEQ ID NO: 2645 - DNA, 33 bp, Homo sapiens
taacatttggtattaaratatgttctggcatgg

SEQ ID NO: 2646 - DNA, 33 bp, Homo sapiens
ctgtacattaatacccyaagaggcaatgtaagg

SEQ ID NO: 2647 - DNA, 33 bp, Homo sapiens
ggaagtcaagatgaackaaggttggctgtaaat

SEQ ID NO: 2648 - DNA, 33 bp, Homo sapiens
tgagaaaggtactgtamattctaaacttatgcc

SEQ ID NO: 2649 - DNA, 33 bp, Homo sapiens
cccaccactccacaacragccactaggagtttc

SEQ ID NO: 2650 - DNA, 33 bp, Homo sapiens
agactagttatcttacycatctcttacaactgg

SEQ ID NO: 2651 - DNA, 33 bp, Homo sapiens
aattttcctttctcagycgtcttctacctccag

SEQ ID NO: 2652 - DNA, 33 bp, Homo sapiens
gtcaccctgtgaaaaamcacccatattctttct

SEQ ID NO: 2653 - DNA, 33 bp, Homo sapiens
atgtaagtgtgaaataygcttctttggaaggaa

SEQ ID NO: 2654 - DNA, 33 bp, Homo sapiens
taagaccccttcaacartgaatgataacacaga

SEQ ID NO: 2655 - DNA, 33 bp, Homo sapiens
gcaccaaacattgaacsagtatccacttcgaaa

SEQ ID NO: 2656 - DNA, 33 bp, Homo sapiens
tgaacgcctttaagaartggtccctggctgccc

SEQ ID NO: 2657 - DNA, 33 bp, Homo sapiens
gctctctgtagcacaayagttaagtaagcacac

SEQ ID NO: 2658 - DNA, 33 bp, Homo sapiens
caggtttattgaggaakaattggtatacaaata

SEQ ID NO: 2659 - DNA, 33 bp, Homo sapiens
agagatttgtttttccrgccatctatagagatt

SEQ ID NO: 2660 - DNA, 33 bp, Homo sapiens
gttctttgaatgaaagyagaaatgatcgctaac

SEQ ID NO: 2661 - DNA, 33 bp, Homo sapiens
tatggtttttatattcsatactctcaggtacag

SEQ ID NO: 2662 - DNA, 33 bp, Homo sapiens
tgttctgtgagtgttaycagcactctggattct

SEQ ID NO: 2663 - DNA, 33 bp, Homo sapiens
aagcagagattggaccrgaaacactcttggatt

SEQ ID NO: 2664 - DNA, 33 bp, Homo sapiens
gaaattggggattgagragattggatcttaaaa

SEQ ID NO: 2665 - DNA, 33 bp, Homo sapiens
agtatttttgtcgtcaygttagggtcagcaaat

SEQ ID NO: 2666 - DNA, 33 bp, Homo sapiens
tctgggaagaccggagragagagacctatggtg

SEQ ID NO: 2667 - DNA, 33 bp, Homo sapiens
tgtgttactatgcgacragtactgctcaccgcc

SEQ ID NO: 2668 - DNA, 33 bp, Homo sapiens
aagaaacaagagacaaytatatgagtgacttaa

SEQ ID NO: 2669 - DNA, 33 bp, Homo sapiens
cggtcatagaggtttcyaaaatttggtgttcac

SEQ ID NO: 2670 - DNA, 33 bp, Homo sapiens
aagcagtgctggctcayatacactagctgcagg

SEQ ID NO: 2671 - DNA, 33 bp, Homo sapiens
atttggtgatgacctgragataaacatttggaa

SEQ ID NO: 2672 - DNA, 33 bp, Homo sapiens
catgagcaagggtgaaytcagtgttatcataga

SEQ ID NO: 2673 - DNA, 33 bp, Homo sapiens
cttgcagagatacttakgcttttgttaagaatt

SEQ ID NO: 2674 - DNA, 33 bp, Homo sapiens
ctattgttaagcagtayaagacaggtctcttaa

SEQ ID NO: 2675 - DNA, 33 bp, Homo sapiens
ttactgagttctaatargtgattggcaaaggaa

SEQ ID NO: 2676 - DNA, 33 bp, Homo sapiens
gctcccatcctaaacaygcacaacctgaaagag

SEQ ID NO: 2677 - DNA, 33 bp, Homo sapiens
tttctgaggattaacckaagcaatttttaccag

SEQ ID NO: 2678 - DNA, 33 bp, Homo sapiens
cttctattccctcactyagtagtcaacacagaa

SEQ ID NO: 2679 - DNA, 33 bp, Homo sapiens
atattcttaacacttaragactctcacaaacca

SEQ ID NO: 2680 - DNA, 33 bp, Homo sapiens
atgaacatggcttgaaygctagatactggagtt

SEQ ID NO: 2681 - DNA, 33 bp, Homo sapiens
aaagggttggaggtcarggaagccgtctctaga

SEQ ID NO: 2682 - DNA, 33 bp, Homo sapiens
tggaagtatttgcatgrcataatgcagaatagg

SEQ ID NO: 2683 - DNA, 33 bp, Homo sapiens
acatagaaacggctaascagtagatattttcag

SEQ ID NO: 2684 - DNA, 33 bp, Homo sapiens
ggaagagtccaaatgtyaaatatggttccagga

SEQ ID NO: 2685 - DNA, 33 bp, Homo sapiens
agcaaaacaacaatcaygcaacccccaaatcct

SEQ ID NO: 2686 - DNA, 33 bp, Homo sapiens
tatattcaaaatagaartgagctgaattagaac

SEQ ID NO: 2687 - DNA, 33 bp, Homo sapiens
tactgactataagatayattttgccagaatgaa

SEQ ID NO: 2688 - DNA, 33 bp, Homo sapiens
attcagtcacaagttamggtctcaaggacataa

SEQ ID NO: 2689 - DNA, 33 bp, Homo sapiens
gggttttctgggctaakagtggacccactgcag

SEQ ID NO: 2690 - DNA, 33 bp, Homo sapiens
ttttgaatctcaaaccrcttcttgtcttctccc

SEQ ID NO: 2691 - DNA, 33 bp, Homo sapiens
atgtaactgtggctaayctttcttactctgata

SEQ ID NO: 2692 - DNA, 33 bp, Homo sapiens
gttaacaacaacataarataactgtgagactaa

SEQ ID NO: 2693 - DNA, 33 bp, Homo sapiens
caaattcaaagttcaartcgtatttctggctaa

SEQ ID NO: 2694 - DNA, 33 bp, Homo sapiens
ggagttgagcaagaaasaaaagatccaggatag

SEQ ID NO: 2695 - DNA, 33 bp, Homo sapiens
gacatagctctgagttraaagagtgacagcgaa

SEQ ID NO: 2696 - DNA, 33 bp, Homo sapiens
ctgttctggctctgtargaacactagactttgc

SEQ ID NO: 2697 - DNA, 33 bp, Homo sapiens
aaaataaagaggaaaamtaatctgaacttttat

SEQ ID NO: 2698 - DNA, 33 bp, Homo sapiens
aagaattatatcattgrattattactgagcaga

SEQ ID NO: 2699 - DNA, 33 bp, Homo sapiens
gttattcaagttggaartatttgcattatcttt

SEQ ID NO: 2700 - DNA, 33 bp, Homo sapiens
ctggaggctttccaaaygcttctctgacctgac

SEQ ID NO: 2701 - DNA, 33 bp, Homo sapiens
taatctattgctccaawtgaccggctgcctaga

SEQ ID NO: 2702 - DNA, 33 bp, Homo sapiens
tggtggtttgtgcagcrataaattaaaaggcat

SEQ ID NO: 2703 - DNA, 33 bp, Homo sapiens
ttacatatcagttgctragaatatcttcttcca

SEQ ID NO: 2704 - DNA, 33 bp, Homo sapiens
agagtgtgcgctcaagyaggaaagaagtagcat

SEQ ID NO: 2705 - DNA, 33 bp, Homo sapiens
gtttagaggcgccagaraaagggtgaacaggga

SEQ ID NO: 2706 - DNA, 33 bp, Homo sapiens
gaggttatggcatgcasaattagaacatccatg

SEQ ID NO: 2707 - DNA, 33 bp, Homo sapiens
tgtgcctcctgggatayagtgtgtcaggttcat

SEQ ID NO: 2708 - DNA, 33 bp, Homo sapiens
gggggttggataattcrctggtggcaaggagca

SEQ ID NO: 2709 - DNA, 33 bp, Homo sapiens
tataaaagtaattgacractctgggtgattaag

SEQ ID NO: 2710 - DNA, 33 bp, Homo sapiens
cagtgccataggaagawgtgctcaagaagcgtg

SEQ ID NO: 2711 - DNA, 33 bp, Homo sapiens
tcaatgcctcttccaarcacttctaaccaacct

SEQ ID NO: 2712 - DNA, 33 bp, Homo sapiens
aagatttttaagcagcrgagtaacatggttcag

SEQ ID NO: 2713 - DNA, 33 bp, Homo sapiens
agggttggttttagtcrcacctcatggcccacc

SEQ ID NO: 2714 - DNA, 33 bp, Homo sapiens
cacacatacggtaaaartaattagagaggacct

SEQ ID NO: 2715 - DNA, 33 bp, Homo sapiens
tcaaggaatgagcaagkctatgttctgtgggga

SEQ ID NO: 2716 - DNA, 33 bp, Homo sapiens
aggctggggactagtgsatcatcgcttaggatt

SEQ ID NO: 2717 - DNA, 33 bp, Homo sapiens
atcatgctttttaatgyagggcttccatggtag

SEQ ID NO: 2718 - DNA, 33 bp, Homo sapiens
gaaacccaagcccaackctgtcacttccatcta

SEQ ID NO: 2719 - DNA, 33 bp, Homo sapiens
ccattaaataattacargctgcgtgagagagct

SEQ ID NO: 2720 - DNA, 33 bp, Homo sapiens
actgcttcctcactgayccattgttttttggat

SEQ ID NO: 2721 - DNA, 33 bp, Homo sapiens
tgattgtctttcaacakaccatgtgtttcttta

SEQ ID NO: 2722 - DNA, 33 bp, Homo sapiens
tgaatctcaaaaatggwatgatgggcaaaagga

SEQ ID NO: 2723 - DNA, 33 bp, Homo sapiens
gcagccattgacaataygtaacaaatggacatg

SEQ ID NO: 2724 - DNA, 33 bp, Homo sapiens
tctcctttgttttttaratggaagcttacagta

SEQ ID NO: 2725 - DNA, 33 bp, Homo sapiens
gtttaagcgacagtgayggttggattgtagttt

SEQ ID NO: 2726 - DNA, 33 bp, Homo sapiens
ctaattagtaatctccraagactctcacgtttt

SEQ ID NO: 2727 - DNA, 33 bp, Homo sapiens
tggcttccaattttccwctgtaaaaattatctg

SEQ ID NO: 2728 - DNA, 33 bp, Homo sapiens
cacatcaattcaaacaycattcccatctccttt

SEQ ID NO: 2729 - DNA, 33 bp, Homo sapiens
tattcagaaatccatasattgtgtttgcctttt

SEQ ID NO: 2730 - DNA, 33 bp, Homo sapiens
gtcttgttcctaaatcyccatttgacagattgt

SEQ ID NO: 2731 - DNA, 33 bp, Homo sapiens
aagtataaacacaatcyatctctcttcaaagca

SEQ ID NO: 2732 - DNA, 33 bp, Homo sapiens
atacaaaaagggaaagyatgagaggctgtttta

SEQ ID NO: 2733 - DNA, 33 bp, Homo sapiens
aattgtcaatgaatcayaaaacctaaggcattc

SEQ ID NO: 2734 - DNA, 33 bp, Homo sapiens
tgtagttagaactaaarattgaagataggagca

SEQ ID NO: 2735 - DNA, 33 bp, Homo sapiens
tatatgataaagtcacygtcctctttcaaagtc

SEQ ID NO: 2736 - DNA, 33 bp, Homo sapiens
ctgaaatgctaagctgraactagagtctaacat

SEQ ID NO: 2737 - DNA, 33 bp, Homo sapiens
caaagatattcaggaamcaacaaggtaaaattt

SEQ ID NO: 2738 - DNA, 33 bp, Homo sapiens
caaatgagtgttgtgcmcttaaggaaattggct

SEQ ID NO: 2739 - DNA, 33 bp, Homo sapiens
caaagacctaccaaaasatggatgattctgaaa

SEQ ID NO: 2740 - DNA, 33 bp, Homo sapiens
gtcataaaaattgtgaygaaccacatgaggagc

SEQ ID NO: 2741 - DNA, 33 bp, Homo sapiens
gggattacaggtatgcrctggctaacttttgta

SEQ ID NO: 2742 - DNA, 33 bp, Homo sapiens
gccctgtctacctttcsaattccacgttcctgt

SEQ ID NO: 2743 - DNA, 33 bp, Homo sapiens
tttttctaaaaaagtaracttctgcagcatctc

SEQ ID NO: 2744 - DNA, 33 bp, Homo sapiens
tgcttcccagaatcagkaaaattattagttgtt

SEQ ID NO: 2745 - DNA, 33 bp, Homo sapiens
atgtttgaataccctgkcagagagagatttcca

SEQ ID NO: 2746 - DNA, 33 bp, Homo sapiens
cgtatattcccagaaawgagtgaccggaacagt

SEQ ID NO: 2747 - DNA, 33 bp, Homo sapiens
gttagtttactggaccracagaggtgatttccc

SEQ ID NO: 2748 - DNA, 33 bp, Homo sapiens
ctgcaacaacagaatastaatgcactgtcatga

SEQ ID NO: 2749 - DNA, 33 bp, Homo sapiens
gttgacctggtgaagayacagaggctttacctg

SEQ ID NO: 2750 - DNA, 33 bp, Homo sapiens
gcaggtgtctccacatwagaagcatcctatgta

SEQ ID NO: 2751 - DNA, 33 bp, Homo sapiens
tggcttcacactagcayatttgtttcctcattc

SEQ ID NO: 2752 - DNA, 33 bp, Homo sapiens
ctcataggtcaagttayaggaagtaaagcactt

SEQ ID NO: 2753 - DNA, 33 bp, Homo sapiens
tcatttctctgcttacrgggccgactcgttcct

SEQ ID NO: 2754 - DNA, 33 bp, Homo sapiens
tggtcccagggtattakgaggctctctgaagtt

SEQ ID NO: 2755 - DNA, 33 bp, Homo sapiens
ctgtatcaagccactaycccttgatctctccaa

SEQ ID NO: 2756 - DNA, 33 bp, Homo sapiens
tgccaccatccaaaaartgacatattgttcact

SEQ ID NO: 2757 - DNA, 33 bp, Homo sapiens
attaaggacatggagamgagtgactcaatagta

SEQ ID NO: 2758 - DNA, 33 bp, Homo sapiens
ttcatgttaaataaaaygtagcaatgatagtca

SEQ ID NO: 2759 - DNA, 33 bp, Homo sapiens
tgtgaagagggctgtcmagacaggagctgtgca

SEQ ID NO: 2760 - DNA, 33 bp, Homo sapiens
aaggatatttggacacrcttaatatcttttgga

SEQ ID NO: 2761 - DNA, 33 bp, Homo sapiens
ccagcggaaccagagascgccgtagtgaccttc

SEQ ID NO: 2762 - DNA, 33 bp, Homo sapiens
agatgggtagttatgayctgcactctagctaag

SEQ ID NO: 2763 - DNA, 33 bp, Homo sapiens
gaagagatgtgggggcrgaaagacaggaaatag

SEQ ID NO: 2764 - DNA, 33 bp, Homo sapiens
tagtgaggctcacagcragttaggtagatggga

SEQ ID NO: 2765 - DNA, 33 bp, Homo sapiens
cagatggagaacctggmccaagaaagagagagg

SEQ ID NO: 2766 - DNA, 33 bp, Homo sapiens
cggcaacatctgggaamctgtcggaagtgcaca

SEQ ID NO: 2767 - DNA, 33 bp, Homo sapiens
cataacatcattggaayatacctgtgagtgaag

SEQ ID NO: 2768 - DNA, 33 bp, Homo sapiens
ttcatctgaatctcctyagatgtccctccgtgt

SEQ ID NO: 2769 - DNA, 33 bp, Homo sapiens
ccagcttaagcagttayagacatcatagaatat

SEQ ID NO: 2770 - DNA, 33 bp, Homo sapiens
catctgcatctgttacygcaatcagggccccta

SEQ ID NO: 2771 - DNA, 33 bp, Homo sapiens
ttacacgagctctttcmatctctttatcataac

SEQ ID NO: 2772 - DNA, 33 bp, Homo sapiens
gaatagcattttgttarggtcagaattttccag

SEQ ID NO: 2773 - DNA, 33 bp, Homo sapiens
gtactagctctccttasgcttagggtggtagat

SEQ ID NO: 2774 - DNA, 33 bp, Homo sapiens
tctccttgtaattttcyactgatacatgagctt

SEQ ID NO: 2775 - DNA, 33 bp, Homo sapiens
taacagcttagaggacmgatgatggtgtcagat

SEQ ID NO: 2776 - DNA, 33 bp, Homo sapiens
ggtgaaaggaactatcyatcccggactttgttc

SEQ ID NO: 2777 - DNA, 33 bp, Homo sapiens
aacttgaaccattaaaytagaaccctccagggc

SEQ ID NO: 2778 - DNA, 33 bp, Homo sapiens
gagaagcatattagcastgacctaaatggccat

SEQ ID NO: 2779 - DNA, 33 bp, Homo sapiens
actgagcttagcaatcyccaacgtattgatttt

SEQ ID NO: 2780 - DNA, 33 bp, Homo sapiens
ttcatgtgttataatgratgttaccgatggatt

SEQ ID NO: 2781 - DNA, 33 bp, Homo sapiens
gttgaagatacaaacaraccctctataatcctc

SEQ ID NO: 2782 - DNA, 33 bp, Homo sapiens
tggcgggcaactgggaygagcaagtttctttgc

SEQ ID NO: 2783 - DNA, 33 bp, Homo sapiens
actatcttaagtgcacygaataatcaacaccag

SEQ ID NO: 2784 - DNA, 33 bp, Homo sapiens
aatatcattccatcaarctaaatttttaactac

SEQ ID NO: 2785 - DNA, 33 bp, Homo sapiens
gatacacagattgtcaytaggttatcttctgta

SEQ ID NO: 2786 - DNA, 33 bp, Homo sapiens
gcttaagcaaaaaggcratttactagaaagata

SEQ ID NO: 2787 - DNA, 33 bp, Homo sapiens
aaaaaaaattgcacaawcacacggatataggga

SEQ ID NO: 2788 - DNA, 33 bp, Homo sapiens
ctgaccatttccttacyggttatcttcctttcg

SEQ ID NO: 2789 - DNA, 33 bp, Homo sapiens
cttttatgaccttaaaytcctatgcactaactg

SEQ ID NO: 2790 - DNA, 33 bp, Homo sapiens
agataacctcccatgcraaatgagtaggtttta

SEQ ID NO: 2791 - DNA, 33 bp, Homo sapiens
atgagctgatcttttgsattgatgaatcacccc

SEQ ID NO: 2792 - DNA, 33 bp, Homo sapiens
tcatgactgtgctgaawgggaagaaaagtgttc

SEQ ID NO: 2793 - DNA, 33 bp, Homo sapiens
gtgatgagctgcttccyccacgatttcactcaa

SEQ ID NO: 2794 - DNA, 33 bp, Homo sapiens
atcacacaggtaataaytggtccattgtgagcc

SEQ ID NO: 2795 - DNA, 33 bp, Homo sapiens
gggcaaggaatagccartctttaaacagaatct

SEQ ID NO: 2796 - DNA, 33 bp, Homo sapiens
tatttgaagacttaggmagcctctgctaggcat

SEQ ID NO: 2797 - DNA, 33 bp, Homo sapiens
cttaagcatggctgaaygtccagagaacatttc

SEQ ID NO: 2798 - DNA, 33 bp, Homo sapiens
cagagcataaaagaaayagacatacacacagat

SEQ ID NO: 2799 - DNA, 33 bp, Homo sapiens
cgaaaaactgcaacatyagctgggcgtggcagc

SEQ ID NO: 2800 - DNA, 33 bp, Homo sapiens
gactacatccttataawctgcctcaggaagcaa

SEQ ID NO: 2801 - DNA, 33 bp, Homo sapiens
tcgtgggagcttgtcayatacagcatctctttt

SEQ ID NO: 2802 - DNA, 33 bp, Homo sapiens
cccctgaaaactggtaygagacaagaatgccca

SEQ ID NO: 2803 - DNA, 33 bp, Homo sapiens
aaaaataataagcctaycttatctctctacatg

SEQ ID NO: 2804 - DNA, 33 bp, Homo sapiens
agctttatctgtatccraacagaggggaataaa

SEQ ID NO: 2805 - DNA, 33 bp, Homo sapiens
tgctgccggttgcatargagtctagcacacaca

SEQ ID NO: 2806 - DNA, 33 bp, Homo sapiens
atggctcaatgtgacawcccttacaaaagcaag

SEQ ID NO: 2807 - DNA, 33 bp, Homo sapiens
caaataagcaacttackgaaggtcatgtgactc

SEQ ID NO: 2808 - DNA, 33 bp, Homo sapiens
tccaattagtaggacamagagcgatgctaccat

SEQ ID NO: 2809 - DNA, 33 bp, Homo sapiens
aatgtggctcaccctaycttgctggtctgaggg

SEQ ID NO: 2810 - DNA, 33 bp, Homo sapiens
acatactcggtgaatgrcagatagctcccactt

SEQ ID NO: 2811 - DNA, 33 bp, Homo sapiens
tgatagcaccagagacraaaaaagtgccagggg

SEQ ID NO: 2812 - DNA, 33 bp, Homo sapiens
agataagaaagcaaagsccaagtctcatagctg

SEQ ID NO: 2813 - DNA, 33 bp, Homo sapiens
gaaatgggaacacaatkatataaactacagtcc

SEQ ID NO: 2814 - DNA, 33 bp, Homo sapiens
tgatgggcctgagatcracttcagtgatgggga

SEQ ID NO: 2815 - DNA, 33 bp, Homo sapiens
caagtaagataatatgratttgacaccccaaca

SEQ ID NO: 2816 - DNA, 33 bp, Homo sapiens
ttgcaaagctccacgargcaagtgagtcgccta

SEQ ID NO: 2817 - DNA, 33 bp, Homo sapiens
tggaagtcacaaaatayctaacctgggggccat

SEQ ID NO: 2818 - DNA, 33 bp, Homo sapiens
cactaggttgtagtaayatttgtataacatggc

SEQ ID NO: 2819 - DNA, 33 bp, Homo sapiens
agaagaggtgtgacaarcgactggcacacagca

SEQ ID NO: 2820 - DNA, 33 bp, Homo sapiens
cattgtgttttctcaaygattcaacctaacagg

SEQ ID NO: 2821 - DNA, 33 bp, Homo sapiens
ataaatatgaaaaaaaytgaatgtggcaattaa

SEQ ID NO: 2822 - DNA, 33 bp, Homo sapiens
gagatctgattttgtgyatgcttgaatccctgt

SEQ ID NO: 2823 - DNA, 33 bp, Homo sapiens
cttttccttatccagcratgacttacctcttac

SEQ ID NO: 2824 - DNA, 33 bp, Homo sapiens
ttgcaactaagagtcaygattggccgggcacag

SEQ ID NO: 2825 - DNA, 33 bp, Homo sapiens
aatgttacagggagagraatgaagtggagttgc

SEQ ID NO: 2826 - DNA, 33 bp, Homo sapiens
tgccacacatctggcayggagccaaggcagaag

SEQ ID NO: 2827 - DNA, 33 bp, Homo sapiens
tcctgaaacatcagcamcacatggtattgtagc

SEQ ID NO: 2828 - DNA, 33 bp, Homo sapiens
aaaatggctaccagcayagatgaaacaaaactg

SEQ ID NO: 2829 - DNA, 33 bp, Homo sapiens
ttccagaagtatctggkagtttacatagccaat

SEQ ID NO: 2830 - DNA, 33 bp, Homo sapiens
cacttatggctctcggmaagtaaagcatctcca

SEQ ID NO: 2831 - DNA, 33 bp, Homo sapiens
gtctgtttcctaagaargacaatgataatgaac

SEQ ID NO: 2832 - DNA, 33 bp, Homo sapiens
tcggtgtgcctgtgaarcttggggatcttgtta

SEQ ID NO: 2833 - DNA, 33 bp, Homo sapiens
tcagagcttggctgaartctgaaccccagctgc

SEQ ID NO: 2834 - DNA, 33 bp, Homo sapiens
aaatagcttctgaagaygaaggtagaataaata

SEQ ID NO: 2835 - DNA, 33 bp, Homo sapiens
tcctgggaacagtaacrccccagtaacactgag

SEQ ID NO: 2836 - DNA, 33 bp, Homo sapiens
atgtgaaactgaagcakaggaaaatacttacat

SEQ ID NO: 2837 - DNA, 33 bp, Homo sapiens
catagtaagtactccaygaatgctagcttttat

SEQ ID NO: 2838 - DNA, 33 bp, Homo sapiens
aaacatagcttgattcracaaatacctaccgag

SEQ ID NO: 2839 - DNA, 33 bp, Homo sapiens
ttattgttaatgttgcrgaatactttaaatatc

SEQ ID NO: 2840 - DNA, 33 bp, Homo sapiens
atgaagagctagaactraaagaccacatagggg

SEQ ID NO: 2841 - DNA, 33 bp, Homo sapiens
aagaatgattgtctccycagaatccacacgagc

SEQ ID NO: 2842 - DNA, 33 bp, Homo sapiens
atgttgcagtaggaatraccttgaatcttatgt

SEQ ID NO: 2843 - DNA, 33 bp, Homo sapiens
ggctaaggtaacaaccrgaaggtactcattcca

SEQ ID NO: 2844 - DNA, 33 bp, Homo sapiens
attcactggcagtaagmctccagagctcttttc

SEQ ID NO: 2845 - DNA, 33 bp, Homo sapiens
tcaatatccaagtaaawcattttgctggtttaa

SEQ ID NO: 2846 - DNA, 33 bp, Homo sapiens
tagcaaatttgtgcctsagaaatccaatgtccc

SEQ ID NO: 2847 - DNA, 33 bp, Homo sapiens
atgcacctttgagctasggccaggctctaccac

SEQ ID NO: 2848 - DNA, 33 bp, Homo sapiens
gaaaatggagcaatacrcactagcccaccattt

SEQ ID NO: 2849 - DNA, 33 bp, Homo sapiens
cccgtaagtcacaaacyggccgcatggcccttg

SEQ ID NO: 2850 - DNA, 33 bp, Homo sapiens
tggaccctctcttctcyaccaagcctctcacct

SEQ ID NO: 2851 - DNA, 33 bp, Homo sapiens
aggaaaatctggaatayatgctgaacctaagaa

SEQ ID NO: 2852 - DNA, 33 bp, Homo sapiens
actgtattctacccaayggacagtaacatttga

SEQ ID NO: 2853 - DNA, 33 bp, Homo sapiens
aattgtagctctcacawtaaagctgggtgaaaa

SEQ ID NO: 2854 - DNA, 33 bp, Homo sapiens
agttaggattgtcttarcatttaaactggcagt

SEQ ID NO: 2855 - DNA, 33 bp, Homo sapiens
ccattcattccaagtcmaagagttctatctctg

SEQ ID NO: 2856 - DNA, 33 bp, Homo sapiens
agaagcccgacaaaacygacctttagaaagatg

SEQ ID NO: 2857 - DNA, 33 bp, Homo sapiens
aactgagactgccaaasagataatctagaatcc

SEQ ID NO: 2858 - DNA, 33 bp, Homo sapiens
caaggcctgaatcaaakctcagagacttgaagc

SEQ ID NO: 2859 - DNA, 33 bp, Homo sapiens
tgagatgagtgtctacracttacgcttgttcga

SEQ ID NO: 2860 - DNA, 33 bp, Homo sapiens
gactgtatgggtggacyaacataaattgaccca

SEQ ID NO: 2861 - DNA, 33 bp, Homo sapiens
acaaagcctccttttgmatggattaggaaaaca

SEQ ID NO: 2862 - DNA, 33 bp, Homo sapiens
gtatagataatcttccmaggattgtttagtgaa

SEQ ID NO: 2863 - DNA, 33 bp, Homo sapiens
atgtgttatgtctttcraacatctgtcagtcag

SEQ ID NO: 2864 - DNA, 33 bp, Homo sapiens
agaggagaattagtgamaaatcctctcacagta

SEQ ID NO: 2865 - DNA, 33 bp, Homo sapiens
agagacatgaagccagrcagttaagggaatctg

SEQ ID NO: 2866 - DNA, 33 bp, Homo sapiens
tagctgtcctcaggatwaaacttcccacaagat

SEQ ID NO: 2867 - DNA, 33 bp, Homo sapiens
tccttgatggtatgaargaaattgctcataaca

SEQ ID NO: 2868 - DNA, 33 bp, Homo sapiens
actgtatagagatcaaraccagagttccttctt

SEQ ID NO: 2869 - DNA, 33 bp, Homo sapiens
cttacattatgtgtagyacattaagggctcttt

SEQ ID NO: 2870 - DNA, 33 bp, Homo sapiens
attttattcctgctacratctttattatttatg

SEQ ID NO: 2871 - DNA, 33 bp, Homo sapiens
agtacagacagttcaayttcaaggacatcatac

SEQ ID NO: 2872 - DNA, 33 bp, Homo sapiens
tggacaaaggctttgcrcttcggggtggaacag

SEQ ID NO: 2873 - DNA, 33 bp, Homo sapiens
ccaaatgaacaaaaaarccatatccaggttgcc

SEQ ID NO: 2874 - DNA, 33 bp, Homo sapiens
actgagagatagtatarcaggtgaaaagtggga

SEQ ID NO: 2875 - DNA, 33 bp, Homo sapiens
gcaagccttagactagrataacttcttaaactt

SEQ ID NO: 2876 - DNA, 33 bp, Homo sapiens
aggtgccacaagtcagwacagttttcttttccc

SEQ ID NO: 2877 - DNA, 33 bp, Homo sapiens
ttctcattatcctcccraaaaacgaagccccat

SEQ ID NO: 2878 - DNA, 33 bp, Homo sapiens
gctctaaagaaacagcrcttgcctgggcttggc

SEQ ID NO: 2879 - DNA, 33 bp, Homo sapiens
ggtgtgttttattcacmacaatcctcagaagtg

SEQ ID NO: 2880 - DNA, 33 bp, Homo sapiens
aagaacatgaactgagrccttgactcattaact

SEQ ID NO: 2881 - DNA, 33 bp, Homo sapiens
ctcttacctgggttacmacaccatctgcaatgt

SEQ ID NO: 2882 - DNA, 33 bp, Homo sapiens
cgtcacattgtccaaawtggctcatcacctccg

SEQ ID NO: 2883 - DNA, 33 bp, Homo sapiens
ttcagcaaataaaactragaagtgcagccagtg

SEQ ID NO: 2884 - DNA, 33 bp, Homo sapiens
tgaatggtctgctaggraagcttgcatttactt

SEQ ID NO: 2885 - DNA, 33 bp, Homo sapiens
tctcagtatcagaatasaagccaagtctggcct

SEQ ID NO: 2886 - DNA, 33 bp, Homo sapiens
aagtcttggacatttayccaatagctttggaag

SEQ ID NO: 2887 - DNA, 33 bp, Homo sapiens
gtatcatctggtcacaytggtctgctagtagtt

SEQ ID NO: 2888 - DNA, 33 bp, Homo sapiens
gagtagaatgactacasctaacatcaatgaatc

SEQ ID NO: 2889 - DNA, 33 bp, Homo sapiens
ttaaactggctttgcasagctactaaaggagtg

SEQ ID NO: 2890 - DNA, 33 bp, Homo sapiens
ggaattcttggacctgmaaggaagcattttttt

SEQ ID NO: 2891 - DNA, 33 bp, Homo sapiens
cctcccttaactgccaygttgaccctgggcact

SEQ ID NO: 2892 - DNA, 33 bp, Homo sapiens
tcctctagaacagaaakaacttagaacctcttt

SEQ ID NO: 2893 - DNA, 33 bp, Homo sapiens
acatttcaagttcccayattgacgtggctggtc

SEQ ID NO: 2894 - DNA, 33 bp, Homo sapiens
ggggccacagttggcaracaaatcacatccttg

SEQ ID NO: 2895 - DNA, 33 bp, Homo sapiens
ctgttttaaaagactgyatttcagtatgcatcc

SEQ ID NO: 2896 - DNA, 33 bp, Homo sapiens
atttggacacaccgatyaacacatagatacatg

SEQ ID NO: 2897 - DNA, 33 bp, Homo sapiens
tgttaatctacatctamgaagctcagtgaagtg

SEQ ID NO: 2898 - DNA, 33 bp, Homo sapiens
ttcattttcactgaccyaaggaggaataagaca

SEQ ID NO: 2899 - DNA, 33 bp, Homo sapiens
gagctgtaaatatgtayaatgtgaagctgatag

SEQ ID NO: 2900 - DNA, 33 bp, Homo sapiens
agagaacacaattagargagggtaattcaagac

SEQ ID NO: 2901 - DNA, 33 bp, Homo sapiens
catccttgggactagayggcatttacaacatga

SEQ ID NO: 2902 - DNA, 33 bp, Homo sapiens
acccttttaggttttayggcttgctgtgaggtc

SEQ ID NO: 2903 - DNA, 33 bp, Homo sapiens
caagagtgatattgctraaagaacacgaagtca

SEQ ID NO: 2904 - DNA, 33 bp, Homo sapiens
cttcccccactcctagycaccacaacttagcca

SEQ ID NO: 2905 - DNA, 33 bp, Homo sapiens
taaggacacagattcaygggtgagctttagggg

SEQ ID NO: 2906 - DNA, 33 bp, Homo sapiens
aaggtcagcctagcagkagtacaataagcaagg

SEQ ID NO: 2907 - DNA, 33 bp, Homo sapiens
caaactaattgagcgargactcatgtatcacta

SEQ ID NO: 2908 - DNA, 33 bp, Homo sapiens
ttgtcattgctttgtaygtgtgaataaacttta

SEQ ID NO: 2909 - DNA, 33 bp, Homo sapiens
cccagacctcctgaccsgatgcaattctctccc

SEQ ID NO: 2910 - DNA, 33 bp, Homo sapiens
gggagacagcagaacckgagaaagaaatgggtg

SEQ ID NO: 2911 - DNA, 33 bp, Homo sapiens
ttaagtttcatcatagraggagatttgcaactt

SEQ ID NO: 2912 - DNA, 33 bp, Homo sapiens
ctgctctgtaaatacgmaaataccattcaacca

SEQ ID NO: 2913 - DNA, 33 bp, Homo sapiens
atgttgctagatgtgayggaagatacaaagaag

SEQ ID NO: 2914 - DNA, 33 bp, Homo sapiens
ttttagggttgatttcrcctaacagattatcca

SEQ ID NO: 2915 - DNA, 33 bp, Homo sapiens
ctacacagagattagaygccagcctcagctact

SEQ ID NO: 2916 - DNA, 33 bp, Homo sapiens
aggcttatagtatgcarccttatatccatcagc

SEQ ID NO: 2917 - DNA, 33 bp, Homo sapiens
tggaggaagtattgccrgaaggattgagtcaga

SEQ ID NO: 2918 - DNA, 33 bp, Homo sapiens
aagaagaaaactaaaastcattacaacattgga

SEQ ID NO: 2919 - DNA, 33 bp, Homo sapiens
gtaacagcaactacatsatgacgcagatacttg

SEQ ID NO: 2920 - DNA, 33 bp, Homo sapiens
tttgcaatggtgttctyaaaaattagaatgtta

SEQ ID NO: 2921 - DNA, 33 bp, Homo sapiens
ctttgggactttcatawccaaaacagagaattt

SEQ ID NO: 2922 - DNA, 33 bp, Homo sapiens
attttatccttaattaygcaagcacccagtaac

SEQ ID NO: 2923 - DNA, 33 bp, Homo sapiens
acagtttatgcatccakcgttaagtcatagcct

SEQ ID NO: 2924 - DNA, 33 bp, Homo sapiens
acacatttacagtgaargcaagtttttcttctg

SEQ ID NO: 2925 - DNA, 33 bp, Homo sapiens
tgtctcttccggtagayagcagtaaagcctgat

SEQ ID NO: 2926 - DNA, 33 bp, Homo sapiens
attgggaagtttgttgsaaatggaaatggaaag

SEQ ID NO: 2927 - DNA, 33 bp, Homo sapiens
gggaaagaagcacacaktgagtgagagacagag

SEQ ID NO: 2928 - DNA, 33 bp, Homo sapiens
ttttaaaatgagaaccrcaatcagagttaaatg

SEQ ID NO: 2929 - DNA, 33 bp, Homo sapiens
gaggaattcaaagaccrggaataaactcattga

SEQ ID NO: 2930 - DNA, 33 bp, Homo sapiens
gtctgatgttattgaartaggatgttcacttga

SEQ ID NO: 2931 - DNA, 33 bp, Homo sapiens
tccataaaccacatgarggcagcaatctcatgc

SEQ ID NO: 2932 - DNA, 33 bp, Homo sapiens
tttctaataaatacacrattctatgtcaaattc

SEQ ID NO: 2933 - DNA, 33 bp, Homo sapiens
ctccaaaaaatattacrccaatgcatgaccttc

SEQ ID NO: 2934 - DNA, 33 bp, Homo sapiens
gttcctcacaaaactayctttgctctattgaag

SEQ ID NO: 2935 - DNA, 33 bp, Homo sapiens
gatgtggatatgtagcwagctcttgtgcgaacc

SEQ ID NO: 2936 - DNA, 33 bp, Homo sapiens
atggcctattgatgtaygacagccatttgctag

SEQ ID NO: 2937 - DNA, 33 bp, Homo sapiens
atttgagtcaggagacmagagctgtcaggtact

SEQ ID NO: 2938 - DNA, 33 bp, Homo sapiens
tcagtagttactatatwaaaaagcaagtgtgaa

SEQ ID NO: 2939 - DNA, 33 bp, Homo sapiens
gatgaaagagtgtgaaytaaattattgaagttg

SEQ ID NO: 2940 - DNA, 33 bp, Homo sapiens
ctgctacttctagtgargctcctcattggcata

SEQ ID NO: 2941 - DNA, 33 bp, Homo sapiens
aaaatttagaaacctgmatatacgcaagtgttg

SEQ ID NO: 2942 - DNA, 33 bp, Homo sapiens
tcaggtacttgatacaktggctacttttatttt

SEQ ID NO: 2943 - DNA, 33 bp, Homo sapiens
aatatttgtagtaaagrcccatctgttaaagaa

SEQ ID NO: 2944 - DNA, 33 bp, Homo sapiens
tgctttgggtccgagamgtagtgttatttccaa

SEQ ID NO: 2945 - DNA, 33 bp, Homo sapiens
aattcagttgtgtgaayagaacacagtttgtgt

SEQ ID NO: 2946 - DNA, 33 bp, Homo sapiens
caccaacattctgaacmgtaccatttagatgtt

SEQ ID NO: 2947 - DNA, 33 bp, Homo sapiens
acctgcctggtgtctaygatctgagactcttct

SEQ ID NO: 2948 - DNA, 33 bp, Homo sapiens
gttgatttaccagtaawtgccaggtacatacac

SEQ ID NO: 2949 - DNA, 33 bp, Homo sapiens
cacagagccagtaacawataacatctctctgac

SEQ ID NO: 2950 - DNA, 33 bp, Homo sapiens
atattgcccaggcttawgtaaaacaaaatactg

SEQ ID NO: 2951 - DNA, 33 bp, Homo sapiens
aggaatagcgaagctamctgagaatcacttgtt

SEQ ID NO: 2952 - DNA, 33 bp, Homo sapiens
ccagcccatctcttcayagttttaggcccaagt

SEQ ID NO: 2953 - DNA, 33 bp, Homo sapiens
tgagttccagttttaaycagcatttggacatat

SEQ ID NO: 2954 - DNA, 33 bp, Homo sapiens
atatggaagaaaccagraatagtgaaatttggg

SEQ ID NO: 2955 - DNA, 33 bp, Homo sapiens
ctttgattgtatggcawcctcttattctattgt

SEQ ID NO: 2956 - DNA, 33 bp, Homo sapiens
caacttgtgttttaacwaaatctccacaggatt

SEQ ID NO: 2957 - DNA, 33 bp, Homo sapiens
ttactcctatttagcasctccctaagaaatgaa

SEQ ID NO: 2958 - DNA, 33 bp, Homo sapiens
atgaaagtaacacctayatcatggcattactgg

SEQ ID NO: 2959 - DNA, 33 bp, Homo sapiens
tagggaagaaagcctayggtggttatggaggga

SEQ ID NO: 2960 - DNA, 33 bp, Homo sapiens
tgtgagaataagcatgmagagtcttgcttttaa

SEQ ID NO: 2961 - DNA, 33 bp, Homo sapiens
cactgggagtccacaayggcctaatgcacgttt

SEQ ID NO: 2962 - DNA, 33 bp, Homo sapiens
cagatccaagtgtgttkaaaaatagtgtcccag

SEQ ID NO: 2963 - DNA, 33 bp, Homo sapiens
ctgttcgcacttctacrgaacaatgtgcaatgt

SEQ ID NO: 2964 - DNA, 33 bp, Homo sapiens
atagctcaaagaggaarcttagaatcaaatagc

SEQ ID NO: 2965 - DNA, 33 bp, Homo sapiens
ctacatgtgtagtttawatctgatgcattacaa

SEQ ID NO: 2966 - DNA, 33 bp, Homo sapiens
aattaatggaagcagtyacatgagcaagtttgc

SEQ ID NO: 2967 - DNA, 33 bp, Homo sapiens
ttctactctgaaattgmagtatattgtccttct

SEQ ID NO: 2968 - DNA, 33 bp, Homo sapiens
gttaatatcaggtgaaratttttaggacgtgca

SEQ ID NO: 2969 - DNA, 33 bp, Homo sapiens
cacccaaacctactgasaataaattgggggaga

SEQ ID NO: 2970 - DNA, 33 bp, Homo sapiens
agccaattcaaagagawtccctcacatggctgt

SEQ ID NO: 2971 - DNA, 33 bp, Homo sapiens
catctataagtgtcggycacaagcatctactac

SEQ ID NO: 2972 - DNA, 33 bp, Homo sapiens
ttaactgtaactagtakatgcctttcaagtaga

SEQ ID NO: 2973 - DNA, 33 bp, Homo sapiens
aaatagtagtcaaatcraatttccaagcatcca

SEQ ID NO: 2974 - DNA, 33 bp, Homo sapiens
atagccacatttaaacrgaatcattaactttgg

SEQ ID NO: 2975 - DNA, 33 bp, Homo sapiens
ctcctaccactctaacyatactgcggtctctgt

SEQ ID NO: 2976 - DNA, 33 bp, Homo sapiens
cctcagtgacgctctamcatagcttgttatagt

SEQ ID NO: 2977 - DNA, 33 bp, Homo sapiens
ctcctttgtttctctcrcatcctacatcccacg

SEQ ID NO: 2978 - DNA, 33 bp, Homo sapiens
cctagaggacctgggaycaagctgctagaccac

SEQ ID NO: 2979 - DNA, 33 bp, Homo sapiens
tcacacacttccgtaaygtttgaaatatcaata

SEQ ID NO: 2980 - DNA, 33 bp, Homo sapiens
ggaagagaaacagactsagtagcccaggccagt

SEQ ID NO: 2981 - DNA, 33 bp, Homo sapiens
atgacagagcttcaaaraccaaagatgaaacga

SEQ ID NO: 2982 - DNA, 33 bp, Homo sapiens
gaggtttataccttgaygtagagtgtggaataa

SEQ ID NO: 2983 - DNA, 33 bp, Homo sapiens
tcccccaggaagtgacratcatttgaatcctgg

SEQ ID NO: 2984 - DNA, 33 bp, Homo sapiens
atattgaatgtagaacygtctctaagcacaatt

SEQ ID NO: 2985 - DNA, 33 bp, Homo sapiens
gagtgtctagagtgaakgaggtaatagtcctat

SEQ ID NO: 2986 - DNA, 33 bp, Homo sapiens
gagttcccaaccatgaygggatgtgggtagaac

SEQ ID NO: 2987 - DNA, 33 bp, Homo sapiens
ccatgccaaccggtgckctgccaacaccactgc

SEQ ID NO: 2988 - DNA, 33 bp, Homo sapiens
tgcatcatgaacccaayggactcttttttttct

SEQ ID NO: 2989 - DNA, 33 bp, Homo sapiens
gaagtatgaaatgaagscacaattgtttattag

SEQ ID NO: 2990 - DNA, 33 bp, Homo sapiens
gaagtaataattctcaygtaggtggagagctgc

SEQ ID NO: 2991 - DNA, 33 bp, Homo sapiens
catacacaggacttccragttttctccagttct

SEQ ID NO: 2992 - DNA, 33 bp, Homo sapiens
aaaagatacaaacataygtaagctataagaaat

SEQ ID NO: 2993 - DNA, 33 bp, Homo sapiens
accatatgctaggtaaytggctaggcatgggag

SEQ ID NO: 2994 - DNA, 33 bp, Homo sapiens
gggtgcctaggctttcrcatcaagtgggacttg

SEQ ID NO: 2995 - DNA, 33 bp, Homo sapiens
aaatcctacctccactsacaactgggcttgcaa

SEQ ID NO: 2996 - DNA, 33 bp, Homo sapiens
aagtggaacacccacaytaaagtattagaaagt

SEQ ID NO: 2997 - DNA, 33 bp, Homo sapiens
ccaattttaatccaacsagaatcaaatcctgca

SEQ ID NO: 2998 - DNA, 33 bp, Homo sapiens
gaagctgacagacacasataattttcaagccag

SEQ ID NO: 2999 - DNA, 33 bp, Homo sapiens
agagaggagtaagagartaagaaggacatcaca

SEQ ID NO: 3000 - DNA, 33 bp, Homo sapiens
gaggctaccatgttagraaaggccaaatggaag

SEQ ID NO: 3001 - DNA, 33 bp, Homo sapiens
tgacttaggagtcaaaragcatggatcctactg

SEQ ID NO: 3002 - DNA, 33 bp, Homo sapiens
ataatttagtgctttcrataactgatatgggaa

SEQ ID NO: 3003 - DNA, 33 bp, Homo sapiens
ctgtcaaatcaactcaycttcaacaaaggagtc

SEQ ID NO: 3004 - DNA, 33 bp, Homo sapiens
agaaaagaaagctctcyacactctattttcaga

SEQ ID NO: 3005 - DNA, 33 bp, Homo sapiens
tcgtggaactcagtaamcccagaaagctgtgac

SEQ ID NO: 3006 - DNA, 33 bp, Homo sapiens
ggatggagttccaggcrctcttcaggtagtagc

SEQ ID NO: 3007 - DNA, 33 bp, Homo sapiens
gcagagcactgagggartagagacaggagaaac

SEQ ID NO: 3008 - DNA, 33 bp, Homo sapiens
atataaaagagcttgawtcaaatgttactttta

SEQ ID NO: 3009 - DNA, 33 bp, Homo sapiens
gaataaacaaaaaacaytgcatacagggtaaca

SEQ ID NO: 3010 - DNA, 33 bp, Homo sapiens
catcattttttttcaarcatccagctttatatt

SEQ ID NO: 3011 - DNA, 33 bp, Homo sapiens
ttaataaactggacaaygctcattcctgaagtc

SEQ ID NO: 3012 - DNA, 33 bp, Homo sapiens
tcaaacttcatgtcaayttccagagagttactt

SEQ ID NO: 3013 - DNA, 33 bp, Homo sapiens
ttttctgacacatcaamatttctcaagttcatc

SEQ ID NO: 3014 - DNA, 33 bp, Homo sapiens
tcagaactctgtctcamgaggcgtatttttgtt

SEQ ID NO: 3015 - DNA, 33 bp, Homo sapiens
tgtgtggcctgaatcgwacagtttagatgagtg

SEQ ID NO: 3016 - DNA, 33 bp, Homo sapiens
aatccattgagctgcaracactccaactacact

SEQ ID NO: 3017 - DNA, 33 bp, Homo sapiens
atggcgcatattgaaaygaaaaggatatagaaa

SEQ ID NO: 3018 - DNA, 33 bp, Homo sapiens
gtgttgtaagtactgcygaattattaatttcca

SEQ ID NO: 3019 - DNA, 33 bp, Homo sapiens
ctttgttgtattctcayattttcctgtgccatt

SEQ ID NO: 3020 - DNA, 33 bp, Homo sapiens
ttggttctctctatgcrcatcctggaagtggaa

SEQ ID NO: 3021 - DNA, 33 bp, Homo sapiens
caaatacaagtctacasaaaactgaataaaatt

SEQ ID NO: 3022 - DNA, 33 bp, Homo sapiens
ttccttcttcacttcaytatgctgagcctaagc

SEQ ID NO: 3023 - DNA, 33 bp, Homo sapiens
acctcctttggcacacmgtggtgactgggcaga

SEQ ID NO: 3024 - DNA, 33 bp, Homo sapiens
ttctcaccagtataaargcattcatttttctcc

SEQ ID NO: 3025 - DNA, 33 bp, Homo sapiens
tcctataacccagggaytccactgttggatata

SEQ ID NO: 3026 - DNA, 33 bp, Homo sapiens
acattttgtgggtgcayaacgaataaatgaaaa

SEQ ID NO: 3027 - DNA, 33 bp, Homo sapiens
gaatgaatgaggtaatmaaccaatccaccagtc

SEQ ID NO: 3028 - DNA, 33 bp, Homo sapiens
ttttaacatgaagtaawtccctaaggagccttt

SEQ ID NO: 3029 - DNA, 33 bp, Homo sapiens
ccaataggatatacgcraaggttaatattagaa

SEQ ID NO: 3030 - DNA, 33 bp, Homo sapiens
ttttctcaacactctarcaaagtgggcgacgta

SEQ ID NO: 3031 - DNA, 33 bp, Homo sapiens
agatccatttatggaamtgtccaagacacttag

SEQ ID NO: 3032 - DNA, 33 bp, Homo sapiens
gatttcccttgttgaamcttatacacacttacc

SEQ ID NO: 3033 - DNA, 33 bp, Homo sapiens
gtgcacgtcctctttgwaactctcctcagtagg

SEQ ID NO: 3034 - DNA, 33 bp, Homo sapiens
ggacatttgtgtgagaygaccagtcaggtccgt

SEQ ID NO: 3035 - DNA, 33 bp, Homo sapiens
caggcctgctgggaacragaacagagagaggac

SEQ ID NO: 3036 - DNA, 33 bp, Homo sapiens
taagctgtgatgaagaygtccctgctacgctat

SEQ ID NO: 3037 - DNA, 33 bp, Homo sapiens
ttgagatcctacagccygaggagattaagctgc

SEQ ID NO: 3038 - DNA, 33 bp, Homo sapiens
ctgaatcatagatcacrggaagaatattgcact

SEQ ID NO: 3039 - DNA, 33 bp, Homo sapiens
tttctaggcaaacacaytgaggactctggcatc

SEQ ID NO: 3040 - DNA, 33 bp, Homo sapiens
ccagctttgccacttayggtttcacatgataag

SEQ ID NO: 3041 - DNA, 33 bp, Homo sapiens
gactggacttatcctcrgagaccgagactctct

SEQ ID NO: 3042 - DNA, 33 bp, Homo sapiens
caacctcagtggaaatsaccattactgaggcct

SEQ ID NO: 3043 - DNA, 33 bp, Homo sapiens
accacactgaaactaakgtattccagttctaaa

SEQ ID NO: 3044 - DNA, 33 bp, Homo sapiens
tccagaaacaactctgmatcacaagaagttaag

SEQ ID NO: 3045 - DNA, 33 bp, Homo sapiens
gaaaaaaatactgaagragagtagttcagggtg

SEQ ID NO: 3046 - DNA, 33 bp, Homo sapiens
atctcttgctctggtgratctggctgaatagtt

SEQ ID NO: 3047 - DNA, 33 bp, Homo sapiens
cagaaaccagggttccycatttccaggcttttg

SEQ ID NO: 3048 - DNA, 33 bp, Homo sapiens
cagaaaggagaagaacwgaataggaagaagata

SEQ ID NO: 3049 - DNA, 33 bp, Homo sapiens
accaaaaactgtcttaygtcaaactcccacacc

SEQ ID NO: 3050 - DNA, 33 bp, Homo sapiens
agatgtcagttttcccrcatgactgatgtcact

SEQ ID NO: 3051 - DNA, 33 bp, Homo sapiens
ccagaagttttttggtwaactcatttggcagca

SEQ ID NO: 3052 - DNA, 33 bp, Homo sapiens
ctcaagtctccaaataygctgccagaaatttta

SEQ ID NO: 3053 - DNA, 33 bp, Homo sapiens
gtaacatcttgtaaaastatagtgtacgatatc

SEQ ID NO: 3054 - DNA, 33 bp, Homo sapiens
caaaagtgagatcataratggagaaacacttag

SEQ ID NO: 3055 - DNA, 33 bp, Homo sapiens
ttttatcactctaaaasacagttaataagttta

SEQ ID NO: 3056 - DNA, 33 bp, Homo sapiens
tgtctacagttcagtgracaggcagtgatgggc

SEQ ID NO: 3057 - DNA, 33 bp, Homo sapiens
accaatgttgggcagcraaactgtaaaagtagt

SEQ ID NO: 3058 - DNA, 33 bp, Homo sapiens
ggataaggtatgacatmagtagaacgtgtcatc

SEQ ID NO: 3059 - DNA, 33 bp, Homo sapiens
gacaaatctttcaccargctaaactaagtaaaa

SEQ ID NO: 3060 - DNA, 33 bp, Homo sapiens
aaagtctgtgatctgaygtaaaagacttggcaa

SEQ ID NO: 3061 - DNA, 33 bp, Homo sapiens
catctatgattaactargaaacactttccaaga

SEQ ID NO: 3062 - DNA, 33 bp, Homo sapiens
ttttattccctgtccaktagaaacgatttactt

SEQ ID NO: 3063 - DNA, 33 bp, Homo sapiens
gttcgtccacagctaamcttgctctattatacc

SEQ ID NO: 3064 - DNA, 33 bp, Homo sapiens
agggtaacttgtatagragaagtgtctttcatt

SEQ ID NO: 3065 - DNA, 33 bp, Homo sapiens
tcactctcacatttcamtaagtcttgtagaagt

SEQ ID NO: 3066 - DNA, 33 bp, Homo sapiens
atttctctgtggttcayggcaagactgcatggt

SEQ ID NO: 3067 - DNA, 33 bp, Homo sapiens
taggcagggatagagayggttttcctacttaat

SEQ ID NO: 3068 - DNA, 33 bp, Homo sapiens
gagcaataatccaatgkaaactctaatataaca

SEQ ID NO: 3069 - DNA, 33 bp, Homo sapiens
tcttggcatgctgaacygaaaaaaggggctcag

SEQ ID NO: 3070 - DNA, 33 bp, Homo sapiens
agcctctagaaagaacrcaggccagccaacacc

SEQ ID NO: 3071 - DNA, 33 bp, Homo sapiens
aagagggtgtgcattgraaggctacctattagg

SEQ ID NO: 3072 - DNA, 33 bp, Homo sapiens
ttagaggctacttggcyaatgaagtcctgacct

SEQ ID NO: 3073 - DNA, 33 bp, Homo sapiens
gaaaagcaatcagtggycatgtaagctttgcct

SEQ ID NO: 3074 - DNA, 33 bp, Homo sapiens
ggccactcctctgaatragcccagataaacact

SEQ ID NO: 3075 - DNA, 33 bp, Homo sapiens
ataaattcttggcaatsaaagtcgtccattgaa

SEQ ID NO: 3076 - DNA, 33 bp, Homo sapiens
gcctgaggtgtcagaamcagatcagaggaagtc

SEQ ID NO: 3077 - DNA, 33 bp, Homo sapiens
caatcaaatacccaaakagctaggagagaaatg

SEQ ID NO: 3078 - DNA, 33 bp, Homo sapiens
ggaaaaaagattttccrgctcttgacttataga

SEQ ID NO: 3079 - DNA, 33 bp, Homo sapiens
ccaaaatggagatagargagtacctactggctg

SEQ ID NO: 3080 - DNA, 33 bp, Homo sapiens
tgaatgaaggagatggractcaggcctgctgtg

SEQ ID NO: 3081 - DNA, 33 bp, Homo sapiens
ccatcccaaccagagamcccgtcattccttcct

SEQ ID NO: 3082 - DNA, 33 bp, Homo sapiens
agcactgacttcaataygtccatcaattttcca

SEQ ID NO: 3083 - DNA, 33 bp, Homo sapiens
cacccagttagaatcayccaaaggcatttcact

SEQ ID NO: 3084 - DNA, 33 bp, Homo sapiens
gctggtttggtgagagrcaaaattaaaagaacc

SEQ ID NO: 3085 - DNA, 33 bp, Homo sapiens
aaaatatctccagcacsaatcttagcttttgca

SEQ ID NO: 3086 - DNA, 33 bp, Homo sapiens
acactttcaaaataaaygagtgaatgaataaat

SEQ ID NO: 3087 - DNA, 33 bp, Homo sapiens
atcaaatgagtaaaatraaactactgagacaat

SEQ ID NO: 3088 - DNA, 33 bp, Homo sapiens
attaatttatccaaaartgccagtctctcttcc

SEQ ID NO: 3089 - DNA, 33 bp, Homo sapiens
ccactccatggcagtgmatcataggtccagaga

SEQ ID NO: 3090 - DNA, 33 bp, Homo sapiens
ccactcccgccaatagyaactctgtcacatttc

SEQ ID NO: 3091 - DNA, 33 bp, Homo sapiens
tttttaagtaggtaaartgctcccccaatgtta

SEQ ID NO: 3092 - DNA, 33 bp, Homo sapiens
agagggattaggcacaraatattgaaggtgcag

SEQ ID NO: 3093 - DNA, 33 bp, Homo sapiens
ctttgcaatgtgactgyaattcctcccatcaag

SEQ ID NO: 3094 - DNA, 33 bp, Homo sapiens
aactctttgtagcagtracagcaactgatccca

SEQ ID NO: 3095 - DNA, 33 bp, Homo sapiens
gttatttacatagttayaatgctctttcaaaca

SEQ ID NO: 3096 - DNA, 33 bp, Homo sapiens
atttcaggaaattttgyaattgaggcacaagga

SEQ ID NO: 3097 - DNA, 33 bp, Homo sapiens
tggatactggctaccarggtttttatcactttc

SEQ ID NO: 3098 - DNA, 33 bp, Homo sapiens
caaaagtagactagtakgctgaaatgcaatagt

SEQ ID NO: 3099 - DNA, 33 bp, Homo sapiens
ttgagtttgataaggcygcagagatagacatga

SEQ ID NO: 3100 - DNA, 33 bp, Homo sapiens
ctggaaagagataggtracatctttgtatgggt

SEQ ID NO: 3101 - DNA, 33 bp, Homo sapiens
atacacataaaatttayagccattgcaaagcca

SEQ ID NO: 3102 - DNA, 33 bp, Homo sapiens
tttccacacaggctacmagatattttatttaca

SEQ ID NO: 3103 - DNA, 33 bp, Homo sapiens
aactggaagatgcagcscgacctttgttaatgt

SEQ ID NO: 3104 - DNA, 33 bp, Homo sapiens
gaaggagcttggtgggmaaataggaaggattct

SEQ ID NO: 3105 - DNA, 33 bp, Homo sapiens
aatttccattgtaaaarcccctcatgccctttc

SEQ ID NO: 3106 - DNA, 33 bp, Homo sapiens
cataccatcaccaacascgtaaatatgatgcgc

SEQ ID NO: 3107 - DNA, 33 bp, Homo sapiens
aggaaatgattctcacrgggttggggctgtcct

SEQ ID NO: 3108 - DNA, 33 bp, Homo sapiens
cacttatctagggaaarcacattgtgagccatt

SEQ ID NO: 3109 - DNA, 33 bp, Homo sapiens
gcttgcaaacagcttgyagcgtatataccattt

SEQ ID NO: 3110 - DNA, 33 bp, Homo sapiens
gagttatagttcaataracaccatggctgagca

SEQ ID NO: 3111 - DNA, 33 bp, Homo sapiens
ttcctctgagtttctgkaaaatacacacatctg

SEQ ID NO: 3112 - DNA, 33 bp, Homo sapiens
ttcaaacattcaaaaaraagcaatgcaaataaa

SEQ ID NO: 3113 - DNA, 33 bp, Homo sapiens
tagaacaggggagttayggtctgctccaagagg

SEQ ID NO: 3114 - DNA, 33 bp, Homo sapiens
acgtgatatacgtgacraaaacaaatgagtgaa

SEQ ID NO: 3115 - DNA, 33 bp, Homo sapiens
tgctgtcttgacttgastaacagctactagata

SEQ ID NO: 3116 - DNA, 33 bp, Homo sapiens
agggcctggatattgcrgagaatgagatgctgg

SEQ ID NO: 3117 - DNA, 33 bp, Homo sapiens
accttagggtgaggacraacctaagtctgcaga

SEQ ID NO: 3118 - DNA, 33 bp, Homo sapiens
ccaactctgcaaaacaytatcattcataactgg

SEQ ID NO: 3119 - DNA, 33 bp, Homo sapiens
aggcttgagattacaasgtgaaaactgtttctt

SEQ ID NO: 3120 - DNA, 33 bp, Homo sapiens
ttctgtctagattccartatgaggctattgctg

SEQ ID NO: 3121 - DNA, 33 bp, Homo sapiens
ttctgaatatggttagmcaatttttccagcatc

SEQ ID NO: 3122 - DNA, 33 bp, Homo sapiens
catgtgaatgtggttgsaaaacaaatgtattat

SEQ ID NO: 3123 - DNA, 33 bp, Homo sapiens
atgctaacttaaattasgcagtcacaaaaatac

SEQ ID NO: 3124 - DNA, 33 bp, Homo sapiens
agttagctgaccatcaraaatcatcctggcagg

SEQ ID NO: 3125 - DNA, 33 bp, Homo sapiens
atccagaaggcattccraactctgaccttaaat

SEQ ID NO: 3126 - DNA, 33 bp, Homo sapiens
ctcaaatgcaatgtcartcttgcacaaaacatt

SEQ ID NO: 3127 - DNA, 33 bp, Homo sapiens
tgtactaaaaatatccraaagtattcaggtatg

SEQ ID NO: 3128 - DNA, 33 bp, Homo sapiens
ttaccactgggacactyaattacattcagctac

SEQ ID NO: 3129 - DNA, 33 bp, Homo sapiens
ctcctgtgtttctttaycactgggacacttaat

SEQ ID NO: 3130 - DNA, 33 bp, Homo sapiens
gcacccaaagataaatsaatgatgttacgaagc

SEQ ID NO: 3131 - DNA, 33 bp, Homo sapiens
taggactaaatgaagasgtgagggcagtgtcca

SEQ ID NO: 3132 - DNA, 33 bp, Homo sapiens
ggtaaatgctgcttcawtctctatatctgtata

SEQ ID NO: 3133 - DNA, 33 bp, Homo sapiens
gtgctgggaaaatggayggtgctggatagctac

SEQ ID NO: 3134 - DNA, 33 bp, Homo sapiens
aaaacttattctggccraaataaactgaaaagt

SEQ ID NO: 3135 - DNA, 33 bp, Homo sapiens
gtgtaactgagctcccygctagcctgcaggctt

SEQ ID NO: 3136 - DNA, 33 bp, Homo sapiens
ctaatgatctgattacyacattcaggatgcatt

SEQ ID NO: 3137 - DNA, 33 bp, Homo sapiens
gctctttggctgtcagkatctcaaattcaacat

SEQ ID NO: 3138 - DNA, 33 bp, Homo sapiens
tttattggagagactaygttttcaccaatgcat

SEQ ID NO: 3139 - DNA, 33 bp, Homo sapiens
aattaggacactaagasagagctggaagaactt

SEQ ID NO: 3140 - DNA, 33 bp, Homo sapiens
tgctggttgccactacyaggagagggaggctgc

SEQ ID NO: 3141 - DNA, 33 bp, Homo sapiens
tatgcatgaagtctcaktaacacaagacatcgc

SEQ ID NO: 3142 - DNA, 33 bp, Homo sapiens
ttgtgtgaacttcctarctaggcattcagggaa

SEQ ID NO: 3143 - DNA, 33 bp, Homo sapiens
gatgtatttgtcctcamgtaagaaaatagtcaa

SEQ ID NO: 3144 - DNA, 33 bp, Homo sapiens
gagtgagagcagggacrcttagtttgcagatcc

SEQ ID NO: 3145 - DNA, 33 bp, Homo sapiens
tgcctgagtttccccawgagtagctcattcttt

SEQ ID NO: 3146 - DNA, 33 bp, Homo sapiens
aattagcaaattcttaygtgtggcttagagttt

SEQ ID NO: 3147 - DNA, 33 bp, Homo sapiens
ctcttactctgtgttayggagactgcctgggac

SEQ ID NO: 3148 - DNA, 33 bp, Homo sapiens
tctgcatttgtaacaarctttcaggtgacattg

SEQ ID NO: 3149 - DNA, 33 bp, Homo sapiens
gactgcctgacttgtakgtggcagaaacaactg

SEQ ID NO: 3150 - DNA, 33 bp, Homo sapiens
agccctgaaaatcagcrcaacctcggacatcca

SEQ ID NO: 3151 - DNA, 33 bp, Homo sapiens
aatagtcaagtgaaggraagttttcagtgaaga

SEQ ID NO: 3152 - DNA, 33 bp, Homo sapiens
ttatttgtgagtgatcracgtgaaggaagaaaa

SEQ ID NO: 3153 - DNA, 33 bp, Homo sapiens
atgtactttggtgcagraaaagacccatgggtg

SEQ ID NO: 3154 - DNA, 33 bp, Homo sapiens
gtgctggaaatgtccargacagcatgttatatg

SEQ ID NO: 3155 - DNA, 33 bp, Homo sapiens
attttaatgagaaaacygtatctatttgactgg

SEQ ID NO: 3156 - DNA, 33 bp, Homo sapiens
ttaagtttccaatagcrcatagattttttttct

SEQ ID NO: 3157 - DNA, 33 bp, Homo sapiens
gtgtaatttcacaagamaatgtgggccacttac

SEQ ID NO: 3158 - DNA, 33 bp, Homo sapiens
tcatcctattagaaaayggcagagcagacgctc

SEQ ID NO: 3159 - DNA, 33 bp, Homo sapiens
ttgatttttggatgccmatcatgtgctgaatac

SEQ ID NO: 3160 - DNA, 33 bp, Homo sapiens
ccatagtagtactccaycagcacatgagaataa

SEQ ID NO: 3161 - DNA, 33 bp, Homo sapiens
actttacccttgtcaartatacctccatagaaa

SEQ ID NO: 3162 - DNA, 33 bp, Homo sapiens
gtgatggcccagaaaakagtagtgaagccaatt

SEQ ID NO: 3163 - DNA, 33 bp, Homo sapiens
agatcagtgagggagtraacttagctgcattaa

SEQ ID NO: 3164 - DNA, 33 bp, Homo sapiens
caatccatttatgtacsaggcacggttaaaaca

SEQ ID NO: 3165 - DNA, 33 bp, Homo sapiens
gattgcaaagggtggaygaagataggagagagg

SEQ ID NO: 3166 - DNA, 33 bp, Homo sapiens
ttgacctggtgaaggamtccctggtggtgttta

SEQ ID NO: 3167 - DNA, 33 bp, Homo sapiens
agcacaactttgatcayatcattcattctcatt

SEQ ID NO: 3168 - DNA, 33 bp, Homo sapiens
ccagggctagctctggrcatttcaagagatgta

SEQ ID NO: 3169 - DNA, 33 bp, Homo sapiens
ttcattagcaaagaaartgcttcaccagaaatc

SEQ ID NO: 3170 - DNA, 33 bp, Homo sapiens
taatttgagagacaatmaaacacacaaaaaatg

SEQ ID NO: 3171 - DNA, 33 bp, Homo sapiens
tgaaggctttgtcataygctttgggtctatcta

SEQ ID NO: 3172 - DNA, 33 bp, Homo sapiens
tagtatgtagtagttakgagagtgtattgtaat

SEQ ID NO: 3173 - DNA, 33 bp, Homo sapiens
tcctgaacaactctacratgcctggagtgcctc

SEQ ID NO: 3174 - DNA, 33 bp, Homo sapiens
agtgtccctgtcaacaraggctgggtttagcca

SEQ ID NO: 3175 - DNA, 33 bp, Homo sapiens
tgaccgtattggctaasagaaggttaaatttgc

SEQ ID NO: 3176 - DNA, 33 bp, Homo sapiens
tgaaaatggagtaatayagtaggacccaagaaa

SEQ ID NO: 3177 - DNA, 33 bp, Homo sapiens
agattcaactctaagaygttttatgcagtgatg

SEQ ID NO: 3178 - DNA, 33 bp, Homo sapiens
cgggaggtctttgaaayttaatgtctccctgca

SEQ ID NO: 3179 - DNA, 33 bp, Homo sapiens
ggtaggcagttttgcargcagaaatagaccagt

SEQ ID NO: 3180 - DNA, 33 bp, Homo sapiens
catctcattcaagttasgaatcattagccctgt

SEQ ID NO: 3181 - DNA, 33 bp, Homo sapiens
tgacttaactcttgacycttggctctctttacc

SEQ ID NO: 3182 - DNA, 33 bp, Homo sapiens
gatttcagttcaggaarcgactttctattggcc

SEQ ID NO: 3183 - DNA, 33 bp, Homo sapiens
atgtaagtgagaacacrcaaagtttactcaaca

SEQ ID NO: 3184 - DNA, 33 bp, Homo sapiens
ttgcgcagtatgtcccraaaaggctagctaatg

SEQ ID NO: 3185 - DNA, 33 bp, Homo sapiens
attgaatggaatgttargcctcctttagctttt

SEQ ID NO: 3186 - DNA, 33 bp, Homo sapiens
gttagttaataacaaarctgtggtcatttctcc

SEQ ID NO: 3187 - DNA, 33 bp, Homo sapiens
tctacctctcgtcttcyctaatcagctcctcct

SEQ ID NO: 3188 - DNA, 33 bp, Homo sapiens
tcctagcaccatgtgcyctttatgtctgtagca

SEQ ID NO: 3189 - DNA, 33 bp, Homo sapiens
tcagtagttgagaggasaatgcaaacaaataca

SEQ ID NO: 3190 - DNA, 33 bp, Homo sapiens
gcttctaaaaataaacmcttgctaggctcccac

SEQ ID NO: 3191 - DNA, 33 bp, Homo sapiens
tataaccttccaaaaamttcaacatcatcttcc

SEQ ID NO: 3192 - DNA, 33 bp, Homo sapiens
tggccacatcagatccyctcttacgccctgggc

SEQ ID NO: 3193 - DNA, 33 bp, Homo sapiens
cctctgaagaagtcatwacaagctgagagctga

SEQ ID NO: 3194 - DNA, 33 bp, Homo sapiens
gtctgttggtaaagaartgaaaatggatcacag

SEQ ID NO: 3195 - DNA, 33 bp, Homo sapiens
gtgccaaaaatctagaygatgtgctgctttctt

SEQ ID NO: 3196 - DNA, 33 bp, Homo sapiens
tgagctggcttcctaaytcgcctccaacctcca

SEQ ID NO: 3197 - DNA, 33 bp, Homo sapiens
ttgttatttagccttawgacatttcattagaat

SEQ ID NO: 3198 - DNA, 33 bp, Homo sapiens
actacccggcttatgaraggagagatcacactt

SEQ ID NO: 3199 - DNA, 33 bp, Homo sapiens
tctacttcatgactaartaacttctgcaagtaa

SEQ ID NO: 3200 - DNA, 33 bp, Homo sapiens
gcttgtctgtatctgamggtgacggttaccatt

SEQ ID NO: 3201 - DNA, 33 bp, Homo sapiens
aagaaatctaaatgacyggctctcccctcactt

SEQ ID NO: 3202 - DNA, 33 bp, Homo sapiens
ctgttgcattttaagcrcattcatacacatatg

SEQ ID NO: 3203 - DNA, 33 bp, Homo sapiens
tcctctgtgctctcaamgaggccactctgcttg

SEQ ID NO: 3204 - DNA, 33 bp, Homo sapiens
agaacatctgctcaatkaccgtgaggaaggaag

SEQ ID NO: 3205 - DNA, 33 bp, Homo sapiens
caacccatggtctaggyactttggagtagcacc

SEQ ID NO: 3206 - DNA, 33 bp, Homo sapiens
cttacattctctaataygagttgaggtgcctag

SEQ ID NO: 3207 - DNA, 33 bp, Homo sapiens
ggattcatggcacttaygtaagacacataccca

SEQ ID NO: 3208 - DNA, 33 bp, Homo sapiens
ggattctggctaaatcracctaacagaattctt

SEQ ID NO: 3209 - DNA, 33 bp, Homo sapiens
ggcaaactcaccaagaygggagacagattagtc

SEQ ID NO: 3210 - DNA, 33 bp, Homo sapiens
ggcacaatatccatcartgaatttgcccgcttg

SEQ ID NO: 3211 - DNA, 33 bp, Homo sapiens
ggcacactgcgccaaaygggcactgagcgggca

SEQ ID NO: 3212 - DNA, 33 bp, Homo sapiens
ggcactgttgaaggaaytgctctattttcaaca

SEQ ID NO: 3213 - DNA, 33 bp, Homo sapiens
ggcctcaacaaactagycatgctgtaaagaaag

SEQ ID NO: 3214 - DNA, 33 bp, Homo sapiens
ggcctttattatctgakcctttcctgtgtatga

SEQ ID NO: 3215 - DNA, 33 bp, Homo sapiens
ggctggaggttttcacrcctggtagtctcatgt

SEQ ID NO: 3216 - DNA, 33 bp, Homo sapiens
gggaatagctgcatgaycataagcaagtttcag

SEQ ID NO: 3217 - DNA, 33 bp, Homo sapiens
gggaatatcagtgttcratcagtaaggatggcc

SEQ ID NO: 3218 - DNA, 33 bp, Homo sapiens
gggccacggactccacyggaactgatgggctgg

SEQ ID NO: 3219 - DNA, 33 bp, Homo sapiens
gggcccactgcaagaayaagtactcaatgagca

SEQ ID NO: 3220 - DNA, 33 bp, Homo sapiens
gggccccctaaatgccrgagctacggagataca

SEQ ID NO: 3221 - DNA, 33 bp, Homo sapiens
gggctcacagctacgcmcagggatatgacgttc

SEQ ID NO: 3222 - DNA, 33 bp, Homo sapiens
gggtggtgtttgcatargaaggcgaatgaacaa

SEQ ID NO: 3223 - DNA, 33 bp, Homo sapiens
ggtaaattaagaaatascatagctgcagatgtt

SEQ ID NO: 3224 - DNA, 33 bp, Homo sapiens
ggtactgaagtggctaygaaaacaacaacagct

SEQ ID NO: 3225 - DNA, 33 bp, Homo sapiens
ggtcctggggctctaamggtagtaggggctcta

SEQ ID NO: 3226 - DNA, 33 bp, Homo sapiens
ggtgccgtatctaccargtggtcaagctgatgc

SEQ ID NO: 3227 - DNA, 33 bp, Homo sapiens
ggtgggtgtttccatascatactggcatcattg

SEQ ID NO: 3228 - DNA, 33 bp, Homo sapiens
ggttagattctcacaargcttcatttaaggtgt

SEQ ID NO: 3229 - DNA, 33 bp, Homo sapiens
ggttcaggtggcttctyaaatctctgtgttcaa

SEQ ID NO: 3230 - DNA, 33 bp, Homo sapiens
ggttctcagatgaagargtcataagctacctgg

SEQ ID NO: 3231 - DNA, 33 bp, Homo sapiens
gtaaacaagaagctacratgcaagtatagaggt

SEQ ID NO: 3232 - DNA, 33 bp, Homo sapiens
gtaaaggatggtagtarctctcaaagacgtttt

SEQ ID NO: 3233 - DNA, 33 bp, Homo sapiens
gtaacagatttatggayggatgtgatcctggac

SEQ ID NO: 3234 - DNA, 33 bp, Homo sapiens
gtacctgcctccaaaayagaaagttcattttca

SEQ ID NO: 3235 - DNA, 33 bp, Homo sapiens
gtagatgatctattagmaacaaagtgtctgcca

SEQ ID NO: 3236 - DNA, 33 bp, Homo sapiens
gtagcaagaccacttayggatggctaaaatgtg

SEQ ID NO: 3237 - DNA, 33 bp, Homo sapiens
gtagctaatgtaagttsaaatatgtcctacaaa

SEQ ID NO: 3238 - DNA, 33 bp, Homo sapiens
gtataattttatgatasaccacaataaaacaga

SEQ ID NO: 3239 - DNA, 33 bp, Homo sapiens
actttgctttagggcayatggttaaggagtggc

SEQ ID NO: 3240 - DNA, 33 bp, Homo sapiens
ccttttcacataaaaartccgagggtcaaacac

SEQ ID NO: 3241 - DNA, 33 bp, Homo sapiens
gtcaggatgcatttcaraatcatgagaaagaag

SEQ ID NO: 3242 - DNA, 33 bp, Homo sapiens
gtcagggacttagcacygtgatcatgattgtca

SEQ ID NO: 3243 - DNA, 33 bp, Homo sapiens
gtcagtttgattggctkaactaatagtcttcac

SEQ ID NO: 3244 - DNA, 33 bp, Homo sapiens
gtcatcatattggcaaragactgtctaactaga

SEQ ID NO: 3245 - DNA, 33 bp, Homo sapiens
gtcccgatcactctaaygtttgtgtgtctacgc

SEQ ID NO: 3246 - DNA, 33 bp, Homo sapiens
gtcctcacctgtattcmaatgtatccaagttaa

SEQ ID NO: 3247 - DNA, 33 bp, Homo sapiens
gtcgatgggacactacraaaggcatgaaagcgg

SEQ ID NO: 3248 - DNA, 33 bp, Homo sapiens
gtctatgctctgaacaytggaccatacagcctg

SEQ ID NO: 3249 - DNA, 33 bp, Homo sapiens
gtctgaacaacagtcayatagctatctctgcag

SEQ ID NO: 3250 - DNA, 33 bp, Homo sapiens
gtctgacaggagataaytggacacttttggggg

SEQ ID NO: 3251 - DNA, 33 bp, Homo sapiens
gtgacaaccaaaaatasgtccaaagattgccat

SEQ ID NO: 3252 - DNA, 33 bp, Homo sapiens
gtgcaggatttgcgtcygaatttcttacccttg

SEQ ID NO: 3253 - DNA, 33 bp, Homo sapiens
gtgcagtgctgctgtcratgttgatgttaattt

SEQ ID NO: 3254 - DNA, 33 bp, Homo sapiens
gtgctggagtaataggycaaatgtatcatggcc

SEQ ID NO: 3255 - DNA, 33 bp, Homo sapiens
gtggcataaaggttcakattattttagtctaca

SEQ ID NO: 3256 - DNA, 33 bp, Homo sapiens
gtggctgctgaacagcygcaaaccatcttcacc

SEQ ID NO: 3257 - DNA, 33 bp, Homo sapiens
gtggggtagatagttawatatgtttgccacctt

SEQ ID NO: 3258 - DNA, 33 bp, Homo sapiens
gtgtaattgtaaaatayggcactagagaaattg

SEQ ID NO: 3259 - DNA, 33 bp, Homo sapiens
gttatagaagaagaaaygagactcagcatggta

SEQ ID NO: 3260 - DNA, 33 bp, Homo sapiens
gttatgaacagagtatragtccatgagggcaag

SEQ ID NO: 3261 - DNA, 33 bp, Homo sapiens
gttccaccctatcatcraccatcagacagagga

SEQ ID NO: 3262 - DNA, 33 bp, Homo sapiens
gttgtgggttgtgttamgagcaaaaatgaacag

SEQ ID NO: 3263 - DNA, 33 bp, Homo sapiens
gtttctgctctttctamcgcgtgatagcggcgc

SEQ ID NO: 3264 - DNA, 33 bp, Homo sapiens
gttttatgatattcacrgtatggagagagaggg

SEQ ID NO: 3265 - DNA, 33 bp, Homo sapiens
taaaacaagtgctttgraaacaaatattcccaa

SEQ ID NO: 3266 - DNA, 33 bp, Homo sapiens
aaatatgcatcaggaamtctagcgtctcagtaa

SEQ ID NO: 3267 - DNA, 33 bp, Homo sapiens
taaagaggcacacttasaagacatatatgtaac

SEQ ID NO: 3268 - DNA, 33 bp, Homo sapiens
cgtgagaatccttccamccttattctgttggcc

SEQ ID NO: 3269 - DNA, 33 bp, Homo sapiens
taaattgatagaatcaytgagtagacatttcac

SEQ ID NO: 3270 - DNA, 33 bp, Homo sapiens
taacaggacactctccrgatttggacccagaac

SEQ ID NO: 3271 - DNA, 33 bp, Homo sapiens
taacatatgttgcctcrctagcattaactacag

SEQ ID NO: 3272 - DNA, 33 bp, Homo sapiens
taacatcaatttcaaayaaggctgttcgcaatc

SEQ ID NO: 3273 - DNA, 33 bp, Homo sapiens
taaccaaagattttgargcccatagcttttctt

SEQ ID NO: 3274 - DNA, 33 bp, Homo sapiens
taacttagcctcagatyagctatgagatcttca

SEQ ID NO: 3275 - DNA, 33 bp, Homo sapiens
taacttgtgatcatccyaatcaagaacaaaagt

SEQ ID NO: 3276 - DNA, 33 bp, Homo sapiens
taagctgaggaaacccragattcagccttggct

SEQ ID NO: 3277 - DNA, 33 bp, Homo sapiens
taagtcagataaattaygtgcctgaggtcagag

SEQ ID NO: 3278 - DNA, 33 bp, Homo sapiens
taatatgtgccaacacyggtccatgctttcaag

SEQ ID NO: 3279 - DNA, 33 bp, Homo sapiens
taatttaaccagagtcraattgtctcgatgaga

SEQ ID NO: 3280 - DNA, 33 bp, Homo sapiens
taattttgcttagaaaygccatgttttactttg

SEQ ID NO: 3281 - DNA, 33 bp, Homo sapiens
tacaaatggctttcatkaggagatgtgtccttt

SEQ ID NO: 3282 - DNA, 33 bp, Homo sapiens
tacacataagcattgartatgacaattgtcaac

SEQ ID NO: 3283 - DNA, 33 bp, Homo sapiens
tacactggtgtgtatawgaaccaaggtataatg

SEQ ID NO: 3284 - DNA, 33 bp, Homo sapiens
tacatacccgctgacakgaaagaaagcagacca

SEQ ID NO: 3285 - DNA, 33 bp, Homo sapiens
tacatcaggtaatctayactgagctaatgtagc

SEQ ID NO: 3286 - DNA, 33 bp, Homo sapiens
taccatttcaaattcastattcaagccatatat

SEQ ID NO: 3287 - DNA, 33 bp, Homo sapiens
taccttctttttggaaygccataaaaattacct

SEQ ID NO: 3288 - DNA, 33 bp, Homo sapiens
tagaggattacaaaggmaggaatgctttaaaac

SEQ ID NO: 3289 - DNA, 33 bp, Homo sapiens
tagataggctgggtgcratttctcatgcctcta

SEQ ID NO: 3290 - DNA, 33 bp, Homo sapiens
tagcagatggcacaaarttgcatgcttaataaa

SEQ ID NO: 3291 - DNA, 33 bp, Homo sapiens
tagcatcctcctaagcraagtccagtgcggccc

SEQ ID NO: 3292 - DNA, 33 bp, Homo sapiens
taggcactgggggataycgtgatgaagatgaac

SEQ ID NO: 3293 - DNA, 33 bp, Homo sapiens
taggcagggttcctagkatgaagaccggggatc

SEQ ID NO: 3294 - DNA, 33 bp, Homo sapiens
taggtcctcttgaagasaacagtgatggtacat

SEQ ID NO: 3295 - DNA, 33 bp, Homo sapiens
tagtgaaagacaataayagcaaaacattggcaa

SEQ ID NO: 3296 - DNA, 33 bp, Homo sapiens
tagtttggtagctccaygaagtctaagtctgtt

SEQ ID NO: 3297 - DNA, 33 bp, Homo sapiens
tataaaacagtacatamctcttccagaaaaagt

SEQ ID NO: 3298 - DNA, 33 bp, Homo sapiens
tatctagcccacaaaayatggtaccagttgaga

SEQ ID NO: 3299 - DNA, 33 bp, Homo sapiens
tatctcaggattttgaragggccaaactaaagg

SEQ ID NO: 3300 - DNA, 33 bp, Homo sapiens
tatctgcctcccttcargttgtagtctctggag

SEQ ID NO: 3301 - DNA, 33 bp, Homo sapiens
tatgccattcagacatyaaggacaagggttttc

SEQ ID NO: 3302 - DNA, 33 bp, Homo sapiens
tattacttcattgaatkactctttgccattttt

SEQ ID NO: 3303 - DNA, 33 bp, Homo sapiens
tattcaccaaactgatmaaaaaatctgcctgtg

SEQ ID NO: 3304 - DNA, 33 bp, Homo sapiens
tattcattctgaaaaawagattgtccaaactta

SEQ ID NO: 3305 - DNA, 33 bp, Homo sapiens
tattctcagtgttttargaggcactaagcccat

SEQ ID NO: 3306 - DNA, 33 bp, Homo sapiens
tatttgtgggttcatasatgatttttcagatgt

SEQ ID NO: 3307 - DNA, 33 bp, Homo sapiens
tcaacattgttatgtcycagggaacgaggaggc

SEQ ID NO: 3308 - DNA, 33 bp, Homo sapiens
tcaattttgaataagawcagtggtgatgtgtgg

SEQ ID NO: 3309 - DNA, 33 bp, Homo sapiens
tcactgcaaaggacatraggcagcaggaacttt

SEQ ID NO: 3310 - DNA, 33 bp, Homo sapiens
tcagcactgtggcaagrcttctgtgttcccaag

SEQ ID NO: 3311 - DNA, 33 bp, Homo sapiens
tcagtgaagaaactcaygatggtaggattgaga

SEQ ID NO: 3312 - DNA, 33 bp, Homo sapiens
tcagttctatgattaaygaggcatcacctctac

SEQ ID NO: 3313 - DNA, 33 bp, Homo sapiens
tcagttgcataataaaytgccaaatatttgaaa

SEQ ID NO: 3314 - DNA, 33 bp, Homo sapiens
tcatcatgtgacagaasgtttgtgagaactgct

SEQ ID NO: 3315 - DNA, 33 bp, Homo sapiens
tcatgagggcttatagraaatatttgtaatgag

SEQ ID NO: 3316 - DNA, 33 bp, Homo sapiens
tcattcccatcaagctyagaggcgaatgcagac

SEQ ID NO: 3317 - DNA, 33 bp, Homo sapiens
tcattgaaagcagctaygggaatatagggatca

SEQ ID NO: 3318 - DNA, 33 bp, Homo sapiens
tcattgattgtatttgmagacctatcttaatat

SEQ ID NO: 3319 - DNA, 33 bp, Homo sapiens
tcatttattaaaacacrgcatgattagaccact

SEQ ID NO: 3320 - DNA, 33 bp, Homo sapiens
tcatttctgtatctggragaaaatagatgcatt

SEQ ID NO: 3321 - DNA, 33 bp, Homo sapiens
tccaaagggcctgtaayggatagtcaataaata

SEQ ID NO: 3322 - DNA, 33 bp, Homo sapiens
tccactcattttcaacrcgactattgagaggac

SEQ ID NO: 3323 - DNA, 33 bp, Homo sapiens
tccagcttccatttccmaacactaagctcactt

SEQ ID NO: 3324 - DNA, 33 bp, Homo sapiens
tccatggagtactatgmaggcatgaaaagaatg

SEQ ID NO: 3325 - DNA, 33 bp, Homo sapiens
tcccactatattcaacygaggtgggctctgtct

SEQ ID NO: 3326 - DNA, 33 bp, Homo sapiens
tcccgataaatcgtgtmaattatttgctcagcc

SEQ ID NO: 3327 - DNA, 33 bp, Homo sapiens
tcctcaaatgcacaaayaatgcaaggacacagg

SEQ ID NO: 3328 - DNA, 33 bp, Homo sapiens
tcctccttctgtttaayacatttttccatctca

SEQ ID NO: 3329 - DNA, 33 bp, Homo sapiens
tcctctacattttccaycttctgttctggcagt

SEQ ID NO: 3330 - DNA, 33 bp, Homo sapiens
tcctgcttcagtgacascatcaataattaagaa

SEQ ID NO: 3331 - DNA, 33 bp, Homo sapiens
tccttcatttattcacwcatattgactgagcct

SEQ ID NO: 3332 - DNA, 33 bp, Homo sapiens
tccttgaaagtcaagtyactctctgattcttta

SEQ ID NO: 3333 - DNA, 33 bp, Homo sapiens
tctaacccactaatcayggttctgaatgagact

SEQ ID NO: 3334 - DNA, 33 bp, Homo sapiens
tctatgtattagatackgaataaatccatattt

SEQ ID NO: 3335 - DNA, 33 bp, Homo sapiens
tctattgctaagatcaygagtgacactttcttg

SEQ ID NO: 3336 - DNA, 33 bp, Homo sapiens
tctcccttgatgaccarctctggtcctactgcc

SEQ ID NO: 3337 - DNA, 33 bp, Homo sapiens
tctccttcctccaaacrgctctaatactttcat

SEQ ID NO: 3338 - DNA, 33 bp, Homo sapiens
tctctcttctcagcagwatcaaaggtaggcata

SEQ ID NO: 3339 - DNA, 33 bp, Homo sapiens
tctgcagataaaccaarcgtctctgactttata

SEQ ID NO: 3340 - DNA, 33 bp, Homo sapiens
tcttatgcatatgacasactgaaggggaaaagc

SEQ ID NO: 3341 - DNA, 33 bp, Homo sapiens
tcttgataaatacaaartcatttctgctgtcac

SEQ ID NO: 3342 - DNA, 33 bp, Homo sapiens
tcttgattctacctcartctacatctatttctt

SEQ ID NO: 3343 - DNA, 33 bp, Homo sapiens
tcttggaggaagggacmcgtattgagttctgaa

SEQ ID NO: 3344 - DNA, 33 bp, Homo sapiens
tctttctcttctttgaracagtcatcattaata

SEQ ID NO: 3345 - DNA, 33 bp, Homo sapiens
tctttgcaattttgaaycatctaattctaccta

SEQ ID NO: 3346 - DNA, 33 bp, Homo sapiens
tctttggatcaaccaawgtttaaccctaacatg

SEQ ID NO: 3347 - DNA, 33 bp, Homo sapiens
tgaaaagtctcagcacrgcgtcaagcacagggt

SEQ ID NO: 3348 - DNA, 33 bp, Homo sapiens
tgaaagctgttttggcygaaagttatgaaaaaa

SEQ ID NO: 3349 - DNA, 33 bp, Homo sapiens
tgaaatatgatggacayggtggtagaaatgtga

SEQ ID NO: 3350 - DNA, 33 bp, Homo sapiens
tgaaatccttgagatargtaagctggtcatgcc

SEQ ID NO: 3351 - DNA, 33 bp, Homo sapiens
tgaaatgcagtgaaatmatccttgcagagaatc

SEQ ID NO: 3352 - DNA, 33 bp, Homo sapiens
tgactgttgctcagaayctagcttaaatatcag

SEQ ID NO: 3353 - DNA, 33 bp, Homo sapiens
tgagaataagaatcacyatcctcaagacaagaa

SEQ ID NO: 3354 - DNA, 33 bp, Homo sapiens
tgatgggtctcaataawgaaccaattcctctgt

SEQ ID NO: 3355 - DNA, 33 bp, Homo sapiens
tgattattttcaatgcmaagttttctgaggatt

SEQ ID NO: 3356 - DNA, 33 bp, Homo sapiens
tgatttgagcgagagayaaatagtgtagtgttt

SEQ ID NO: 3357 - DNA, 33 bp, Homo sapiens
tgcaaatagatcagagsatatatggcgagggtt

SEQ ID NO: 3358 - DNA, 33 bp, Homo sapiens
tgcaaggcacattctcscaactagctatgtagg

SEQ ID NO: 3359 - DNA, 33 bp, Homo sapiens
tgcacacatccgtacargtgtctcaggagcagt

SEQ ID NO: 3360 - DNA, 33 bp, Homo sapiens
tgcatttgttaaaggcygatgtgcttcttaaca

SEQ ID NO: 3361 - DNA, 33 bp, Homo sapiens
tgccacccacttcaacratgctctctaatctag

SEQ ID NO: 3362 - DNA, 33 bp, Homo sapiens
tgcctgagacatgtacrataaagcctgtgattt

SEQ ID NO: 3363 - DNA, 33 bp, Homo sapiens
tgctcctatgagatcarctttttctaaacaagt

SEQ ID NO: 3364 - DNA, 33 bp, Homo sapiens
tggcaataatggttaaygaattgagcaacatca

SEQ ID NO: 3365 - DNA, 33 bp, Homo sapiens
tggctccatttatcacraactagacagcaatcc

SEQ ID NO: 3366 - DNA, 33 bp, Homo sapiens
tggctcctgcagccaartacactgatgatttaa

SEQ ID NO: 3367 - DNA, 33 bp, Homo sapiens
tgggagacagaaatcartcctgaaagttgatga

SEQ ID NO: 3368 - DNA, 33 bp, Homo sapiens
tgggagccatgctgccratttaccagacaaaaa

SEQ ID NO: 3369 - DNA, 33 bp, Homo sapiens
tgggctcggctatcagracatagtcgcaacttt

SEQ ID NO: 3370 - DNA, 33 bp, Homo sapiens
tggtggttggttgaaamtctggagattaagaaa

SEQ ID NO: 3371 - DNA, 33 bp, Homo sapiens
tggtttaaaatcagaarggctacaataaaaaag

SEQ ID NO: 3372 - DNA, 33 bp, Homo sapiens
tgtataatgcaattacrgaatacctcactgtgt

SEQ ID NO: 3373 - DNA, 33 bp, Homo sapiens
tgtatgatatattgacrcaaatcgattgatcaa

SEQ ID NO: 3374 - DNA, 33 bp, Homo sapiens
tgtatgtcaaatggaayggagaatatggagagt

SEQ ID NO: 3375 - DNA, 33 bp, Homo sapiens
tgtcctggattttacartctttctgaaccttgt

SEQ ID NO: 3376 - DNA, 33 bp, Homo sapiens
tgtctccataggaacaytgtataccaggtctag

SEQ ID NO: 3377 - DNA, 33 bp, Homo sapiens
tgtcttagttactgatracagattagtggagga

SEQ ID NO: 3378 - DNA, 33 bp, Homo sapiens
tgtggttagagagtgaygggctgaagaggttag

SEQ ID NO: 3379 - DNA, 33 bp, Homo sapiens
tgtgtctatgctgtacrcttgacagtctcaaac

SEQ ID NO: 3380 - DNA, 33 bp, Homo sapiens
tgtgttagcaggcgtaraaacaacatttacctc

SEQ ID NO: 3381 - DNA, 33 bp, Homo sapiens
tgtttgaaaaaggtgarattcaatggcacaatg

SEQ ID NO: 3382 - DNA, 33 bp, Homo sapiens
tgttttctaatccatawgagaattcagaatttg

SEQ ID NO: 3383 - DNA, 33 bp, Homo sapiens
ttacacagggccacgtraatcacataaggaaat

SEQ ID NO: 3384 - DNA, 33 bp, Homo sapiens
ttacagcagatgcagasgttgagtaatttgctt

SEQ ID NO: 3385 - DNA, 33 bp, Homo sapiens
ttaccaagtgtatcaaygaaagtgcattatcaa

SEQ ID NO: 3386 - DNA, 33 bp, Homo sapiens
ttacccatgctcaaaayttagtatcttgtttca

SEQ ID NO: 3387 - DNA, 33 bp, Homo sapiens
ttactttaaatgtacasaacaatctggctaagt

SEQ ID NO: 3388 - DNA, 33 bp, Homo sapiens
ttagaaaatcagggaawatcaacatttggtctg

SEQ ID NO: 3389 - DNA, 33 bp, Homo sapiens
ttagatgtaaagactgmaaattctaaataaaca

SEQ ID NO: 3390 - DNA, 33 bp, Homo sapiens
ttagcaccactctgaaytctgacttttctagag

SEQ ID NO: 3391 - DNA, 33 bp, Homo sapiens
ttatttccttcctggakgcactgcttaacgttt

SEQ ID NO: 3392 - DNA, 33 bp, Homo sapiens
ttcaaataattgaaaaygtcaggaaattcatag

SEQ ID NO: 3393 - DNA, 33 bp, Homo sapiens
ttcaatatgggtcagayctcagctaaaagactg

SEQ ID NO: 3394 - DNA, 33 bp, Homo sapiens
gagacttgcagtgtgawagtagtaatttactct

SEQ ID NO: 3395 - DNA, 33 bp, Homo sapiens
ttcatacagcggagtcracataacattcatttg

SEQ ID NO: 3396 - DNA, 33 bp, Homo sapiens
ttcctctcccatttacyagcgataggagtggag

SEQ ID NO: 3397 - DNA, 33 bp, Homo sapiens
ttcctgagaggttatgraactggaaaacatata

SEQ ID NO: 3398 - DNA, 33 bp, Homo sapiens
ttcctgcctgtaacttraaggatatcttcccca

SEQ ID NO: 3399 - DNA, 33 bp, Homo sapiens
ttccttttaaacaaacsgtagcatagtatatgt

SEQ ID NO: 3400 - DNA, 33 bp, Homo sapiens
ttcgaaaactttgcaamctctaaaacgtgagga

SEQ ID NO: 3401 - DNA, 33 bp, Homo sapiens
ttctagtgcttcagaakgaataaaaggtcatag

SEQ ID NO: 3402 - DNA, 33 bp, Homo sapiens
ttctctgtccttaccargatgatggttctgttg

SEQ ID NO: 3403 - DNA, 33 bp, Homo sapiens
ttctgaagccatagtaygatgacaaaaagaatg

SEQ ID NO: 3404 - DNA, 33 bp, Homo sapiens
ttcttcacagtgataasaaggcaggatttggga

SEQ ID NO: 3405 - DNA, 33 bp, Homo sapiens
ttctttcctgctgggaytatttctgatcacagg

SEQ ID NO: 3406 - DNA, 33 bp, Homo sapiens
ttctttctgttttcagkaaaaagatagagatta

SEQ ID NO: 3407 - DNA, 33 bp, Homo sapiens
ttgaaagctgtactgayattaaagaatgcatta

SEQ ID NO: 3408 - DNA, 33 bp, Homo sapiens
ttgaattttccatgacracttctcacctgcact

SEQ ID NO: 3409 - DNA, 33 bp, Homo sapiens
ttgcctgggtctttccrctgtcaattctatttt

SEQ ID NO: 3410 - DNA, 33 bp, Homo sapiens
ttgggaccaataagtcratctcctactgaaggt

SEQ ID NO: 3411 - DNA, 33 bp, Homo sapiens
ttgtgaaataactgtcycagactcttcaaaaat

SEQ ID NO: 3412 - DNA, 33 bp, Homo sapiens
ttgtgcagttgactcaytgaaaggcaaaggaag

SEQ ID NO: 3413 - DNA, 33 bp, Homo sapiens
ttgtgtaagctatgcarcttctggttctgttta

SEQ ID NO: 3414 - DNA, 33 bp, Homo sapiens
ttgtttgtaaactatcrgacacttttcgtcata

SEQ ID NO: 3415 - DNA, 33 bp, Homo sapiens
tttacacaagatgctgkaatgcttatatttgtg

SEQ ID NO: 3416 - DNA, 33 bp, Homo sapiens
tttcaagtcaggaaaakttcaaaaagacatgga

SEQ ID NO: 3417 - DNA, 33 bp, Homo sapiens
tttcagataattgaaaracatttgggagttaaa

SEQ ID NO: 3418 - DNA, 33 bp, Homo sapiens
tttcagtacagaactcyatggctgattaatttg

SEQ ID NO: 3419 - DNA, 33 bp, Homo sapiens
tttcagtcttcctatcyataaaacatggctaac

SEQ ID NO: 3420 - DNA, 33 bp, Homo sapiens
tttcatctatcagttasgaggcatacatcttaa

SEQ ID NO: 3421 - DNA, 33 bp, Homo sapiens
tttccagcaaaattcartaactaataggtgctt

SEQ ID NO: 3422 - DNA, 33 bp, Homo sapiens
tttggttttctttgtakgcagggtacgagggag

SEQ ID NO: 3423 - DNA, 33 bp, Homo sapiens
ttttacagatagaagaygtatactaagaaagat

SEQ ID NO: 3424 - DNA, 33 bp, Homo sapiens
ttttagatactacagaygaaacacctagcatag

SEQ ID NO: 3425 - DNA, 33 bp, Homo sapiens
ttttaggagggagcagwaataactatgtatgtc

SEQ ID NO: 3426 - DNA, 33 bp, Homo sapiens
ttttatcaaacggccartagtaaccattgcatc

SEQ ID NO: 3427 - DNA, 33 bp, Homo sapiens
ttttcgatttcatctamcacttcgctctaataa

SEQ ID NO: 3428 - DNA, 33 bp, Homo sapiens
ttttgagtctgcgctaygtgtcacgaacttggt

SEQ ID NO: 3429 - DNA, 33 bp, Homo sapiens
ttttggaaatcaagaaraagtataggccatatt

SEQ ID NO: 3430 - DNA, 33 bp, Homo sapiens
ttttgtgtttttcaggyaaatagatttgtttta

SEQ ID NO: 3431 - DNA, 33 bp, Homo sapiens
tttttccagtactcccyacttgacagcctctca

SEQ ID NO: 3432 - DNA, 33 bp, Homo sapiens
tttttcttcaagttgasagtttcagaaaattga

SEQ ID NO: 3433 - DNA, 33 bp, Homo sapiens
cattgttccttgagtamaaacgaattaaatttg

SEQ ID NO: 3434 - DNA, 33 bp, Homo sapiens
tctactatagccaaaaraagtttactctgtcaa

SEQ ID NO: 3435 - DNA, 33 bp, Homo sapiens
cttggtgctgggcagtracggtggaagtagcca

SEQ ID NO: 3436 - DNA, 33 bp, Homo sapiens
ttctggctacaaaacakcttttcgtatacaaac

SEQ ID NO: 3437 - DNA, 33 bp, Homo sapiens
ttgatataaacagtctyacaattcagctgatta

SEQ ID NO: 3438 - DNA, 33 bp, Homo sapiens
ttatctcagttttgtargcctcaaatcttttaa

SEQ ID NO: 3439 - DNA, 33 bp, Homo sapiens
tagtatgtgcttcatasagaggttgtaagaata

SEQ ID NO: 3440 - DNA, 33 bp, Homo sapiens
gtcttgttggctaataycaggcaagtttttctg

SEQ ID NO: 3441 - DNA, 33 bp, Homo sapiens
gcccacaatttaggtaygtctctggtagaagga

SEQ ID NO: 3442 - DNA, 33 bp, Homo sapiens
ccaagcattcctctaasctatgacaggctttat

SEQ ID NO: 3443 - DNA, 33 bp, Homo sapiens
gactagaggtcgttacyaagcccttcagaagta

SEQ ID NO: 3444 - DNA, 33 bp, Homo sapiens
ggggttctctgggaaaycgacttgggaaaggag

SEQ ID NO: 3445 - DNA, 33 bp, Homo sapiens
agccagctgcagttgaygggctccttctcttcc

SEQ ID NO: 3446 - DNA, 33 bp, Homo sapiens
ctgaagagagagttgamgaattaggtccaatat

SEQ ID NO: 3447 - DNA, 33 bp, Homo sapiens
ctaaggttgagatttarcacatcacagatgcaa

SEQ ID NO: 3448 - DNA, 33 bp, Homo sapiens
ctcttctgtgggaagcraaaacactgtgcacct

SEQ ID NO: 3449 - DNA, 33 bp, Homo sapiens
catagactgattcctamgtggaaggtcaaatcc

SEQ ID NO: 3450 - DNA, 33 bp, Homo sapiens
tggtcacagtagaaatkaaagtctcctcaagat

SEQ ID NO: 3451 - DNA, 33 bp, Homo sapiens
agacattcatggattayagagaatgactgtgga

SEQ ID NO: 3452 - DNA, 33 bp, Homo sapiens
tagaaccagagcagaaygtagcctcaggaagaa

SEQ ID NO: 3453 - DNA, 33 bp, Homo sapiens
aggttctaccacattargcagtcaagataattt

SEQ ID NO: 3454 - DNA, 33 bp, Homo sapiens
gaaagtgagaagcatgrgaaaagctaggaaaga

SEQ ID NO: 3455 - DNA, 33 bp, Homo sapiens
tctaaccatattctgaygttgtagagacaatag

SEQ ID NO: 3456 - DNA, 33 bp, Homo sapiens
tgttgctctttaaatgraagcaaacttgtgtgc

SEQ ID NO: 3457 - DNA, 33 bp, Homo sapiens
cttagggaagttcttakccagtaagttagaaag

SEQ ID NO: 3458 - DNA, 33 bp, Homo sapiens
ctctgcttagaaaagaygctcaaatgctcttta

SEQ ID NO: 3459 - DNA, 33 bp, Homo sapiens
tcaccagaaacaagacrctgaattgactggcac

SEQ ID NO: 3460 - DNA, 33 bp, Homo sapiens
ttgataggtggatgaartagacaagatacatag

SEQ ID NO: 3461 - DNA, 33 bp, Homo sapiens
cctggttgtgctgttaygtagcctttccttggt

SEQ ID NO: 3462 - DNA, 33 bp, Homo sapiens
tctaatttccatcatgyattcatttgcattttt

SEQ ID NO: 3463 - DNA, 33 bp, Homo sapiens
aaacattactaacaaawccatactgcaataagt

SEQ ID NO: 3464 - DNA, 33 bp, Homo sapiens
tcacgtatgctggagtraataggaaactagagc

SEQ ID NO: 3465 - DNA, 33 bp, Homo sapiens
aaggaagcttcacatarcatttgagttgttctt

SEQ ID NO: 3466 - DNA, 33 bp, Homo sapiens
ggaggtaagctgtatayggaccttgatcttcca

SEQ ID NO: 3467 - DNA, 33 bp, Homo sapiens
cactgcaattcctgtaracactgccaccgaatg

SEQ ID NO: 3468 - DNA, 33 bp, Homo sapiens
gattgcttaccttaaawtctaacctcagctttg

SEQ ID NO: 3469 - DNA, 33 bp, Homo sapiens
ccaatgggattgagtgrcaaatgctggagagaa

SEQ ID NO: 3470 - DNA, 33 bp, Homo sapiens
acctgagtgagatgccraaaaggtgctggagac

SEQ ID NO: 3471 - DNA, 33 bp, Homo sapiens
cattcccagagccccaygtagagcgtcagcatc

SEQ ID NO: 3472 - DNA, 33 bp, Homo sapiens
acaatttttagagaccyacatgacagtcacaat

SEQ ID NO: 3473 - DNA, 33 bp, Homo sapiens
cccaagatggggtgaamttagcatatccatggg

SEQ ID NO: 3474 - DNA, 33 bp, Homo sapiens
cacactgaaaagaaaamcccgttagagactgga

SEQ ID NO: 3475 - DNA, 33 bp, Homo sapiens
ggaatacagtatcatasagacatggttttttat

SEQ ID NO: 3476 - DNA, 33 bp, Homo sapiens
tgatcacatagagtgargtttgggaatctgtat

SEQ ID NO: 3477 - DNA, 33 bp, Homo sapiens
gggaaaagtgtgacgayggtccaacaaagagtt

SEQ ID NO: 3478 - DNA, 33 bp, Homo sapiens
tcgcatagtaaatctgyagtttcctgagactca

SEQ ID NO: 3479 - DNA, 33 bp, Homo sapiens
ctataaagtggctgcayggatgagggacattat

SEQ ID NO: 3480 - DNA, 33 bp, Homo sapiens
aaaccagaatgctttcrcctaaactaacacaac

SEQ ID NO: 3481 - DNA, 33 bp, Homo sapiens
tgattaggaaatgtcawggatacgtctgtaaaa

SEQ ID NO: 3482 - DNA, 33 bp, Homo sapiens
gatgtaatattagaacrcactgttttgccagcc

SEQ ID NO: 3483 - DNA, 33 bp, Homo sapiens
ttttgttggtgtataaragtgctatggatttga

SEQ ID NO: 3484 - DNA, 33 bp, Homo sapiens
accacaatgaagacccraaggcgagaaatgtga

SEQ ID NO: 3485 - DNA, 33 bp, Homo sapiens
tcttgacaaatctggtkagttctcaaggagtat

SEQ ID NO: 3486 - DNA, 33 bp, Homo sapiens
aaagaattcctataccmataagagaaagataca

SEQ ID NO: 3487 - DNA, 33 bp, Homo sapiens
caggtctgcagaggtamctgctcttttgggggt

SEQ ID NO: 3488 - DNA, 33 bp, Homo sapiens
tgcataggtcatcaaasagctggaagccaagca

SEQ ID NO: 3489 - DNA, 33 bp, Homo sapiens
gctagaaattctgatgyaatgccaggagactct

SEQ ID NO: 3490 - DNA, 33 bp, Homo sapiens
gtatggtgagaaaccarctacggattgctgcaa

SEQ ID NO: 3491 - DNA, 33 bp, Homo sapiens
tgatggacgaattagcwgcaagtaaggtaactg

SEQ ID NO: 3492 - DNA, 33 bp, Homo sapiens
gcctcatagtgattaaygggtttgtatagaagc

SEQ ID NO: 3493 - DNA, 33 bp, Homo sapiens
gatttgcaatctgttarcgagagcctactaagt

SEQ ID NO: 3494 - DNA, 33 bp, Homo sapiens
aaaacattttaggctaygacttagagtaagaaa

SEQ ID NO: 3495 - DNA, 33 bp, Homo sapiens
aaaattcttcgaaaaarttattgctacttgaca

SEQ ID NO: 3496 - DNA, 33 bp, Homo sapiens
aaacaaaaaaacatacwcaatatactgcatctg

SEQ ID NO: 3497 - DNA, 33 bp, Homo sapiens
aaacaaggatcggagamagttaccaagatcttg

SEQ ID NO: 3498 - DNA, 33 bp, Homo sapiens
aaacagattggtcttaygctatttcggaagttg

SEQ ID NO: 3499 - DNA, 33 bp, Homo sapiens
aaacagctgcatccaaygtgctgcaccagggct

SEQ ID NO: 3500 - DNA, 33 bp, Homo sapiens
aaacagctgtccaaatkagaaccagcaaagtaa

SEQ ID NO: 3501 - DNA, 33 bp, Homo sapiens
aaactctcctgccaaaygaaatagctattaggc

SEQ ID NO: 3502 - DNA, 33 bp, Homo sapiens
aaacttgagatattccrattgagcaaatgagga

SEQ ID NO: 3503 - DNA, 33 bp, Homo sapiens
agctcacaacacctaamccaggcagtcatgggt

SEQ ID NO: 3504 - DNA, 33 bp, Homo sapiens
aaagaagaggtcaacgraagtatgataaactgc

SEQ ID NO: 3505 - DNA, 33 bp, Homo sapiens
aaagcctcctttcctargtccaacatatcaaac

SEQ ID NO: 3506 - DNA, 33 bp, Homo sapiens
aaaggaactattcttcrctacacgagcactaaa

SEQ ID NO: 3507 - DNA, 33 bp, Homo sapiens
aaaggaaggtgatatgracaaatgactcagctc

SEQ ID NO: 3508 - DNA, 33 bp, Homo sapiens
aaagggattgtgaaaaytgttaatgagaaagca

SEQ ID NO: 3509 - DNA, 33 bp, Homo sapiens
aaagtataactggctayctgagaacattcaatt

SEQ ID NO: 3510 - DNA, 33 bp, Homo sapiens
aaagtgtagggagtgarcaaatctttaaaacag

SEQ ID NO: 3511 - DNA, 33 bp, Homo sapiens
aaatcagctgaacaggycaaactattttcctaa

SEQ ID NO: 3512 - DNA, 33 bp, Homo sapiens
aaatgaacacaaattakatccatgctgaatcgg

SEQ ID NO: 3513 - DNA, 33 bp, Homo sapiens
aacacaaaggcacctcyaggaaatgggaagcta

SEQ ID NO: 3514 - DNA, 33 bp, Homo sapiens
aacattctggaactgcmagcctagggcaccgct

SEQ ID NO: 3515 - DNA, 33 bp, Homo sapiens
aaccaaggattgcaaaktatatacaagccagaa

SEQ ID NO: 3516 - DNA, 33 bp, Homo sapiens
aaccgtaactgtacatsagacagaactgcccaa

SEQ ID NO: 3517 - DNA, 33 bp, Homo sapiens
aacctcacctcgtaaayaggtgttgacttttaa

SEQ ID NO: 3518 - DNA, 33 bp, Homo sapiens
aacgtttaagattcacygtctaaaacactcatt

SEQ ID NO: 3519 - DNA, 33 bp, Homo sapiens
aactacctctactaacyaccatctaagcatgga

SEQ ID NO: 3520 - DNA, 33 bp, Homo sapiens
aactccctcttccttcyaaagttttgcaccatc

SEQ ID NO: 3521 - DNA, 33 bp, Homo sapiens
aactgacgggtgtacartctcaaaatccagtga

SEQ ID NO: 3522 - DNA, 33 bp, Homo sapiens
aactgatcaacatgacrgataaacacaactctg

SEQ ID NO: 3523 - DNA, 33 bp, Homo sapiens
aactgtctcagccaaaragaaggcactaacatg

SEQ ID NO: 3524 - DNA, 33 bp, Homo sapiens
aacttaacagaactagwaaagagatcgaagaac

SEQ ID NO: 3525 - DNA, 33 bp, Homo sapiens
aagaaaaattcagtcayacaaaacaaagaaaat

SEQ ID NO: 3526 - DNA, 33 bp, Homo sapiens
aagacaggtgattcaaytaatcctaatacttgc

SEQ ID NO: 3527 - DNA, 33 bp, Homo sapiens
aagagtgaccctggagyacaaagtagcagcaac

SEQ ID NO: 3528 - DNA, 33 bp, Homo sapiens
aagataatggattctarcggaagaaaggtcacg

SEQ ID NO: 3529 - DNA, 33 bp, Homo sapiens
aagatgttttagtatamatcttgcatagcctgg

SEQ ID NO: 3530 - DNA, 33 bp, Homo sapiens
aagcaattccaaatgcraagagaatatccattc

SEQ ID NO: 3531 - DNA, 33 bp, Homo sapiens
aaggcattagtgcctcyactcaacttgttggct

SEQ ID NO: 3532 - DNA, 33 bp, Homo sapiens
aaggtttgactaacctsacaaaacgaagtgaaa

SEQ ID NO: 3533 - DNA, 33 bp, Homo sapiens
aagtcaagagagaatcraagtcacagaagtaat

SEQ ID NO: 3534 - DNA, 33 bp, Homo sapiens
aagtcacatgactggarcagaaaagagcctgtg

SEQ ID NO: 3535 - DNA, 33 bp, Homo sapiens
aagtccgtcaactaccrccttccatgtgaacca

SEQ ID NO: 3536 - DNA, 33 bp, Homo sapiens
aagtctctgggtcacaytagcctttaccatctt

SEQ ID NO: 3537 - DNA, 33 bp, Homo sapiens
aataatgcatgcaaagrcagaggatcataaaat

SEQ ID NO: 3538 - DNA, 33 bp, Homo sapiens
aatacagtatgatattsaagatgctggctcctg

SEQ ID NO: 3539 - DNA, 33 bp, Homo sapiens
tgtcagttagaaggaaractggagggatactat

SEQ ID NO: 3540 - DNA, 33 bp, Homo sapiens
aatatgtaacacctaamatggaggactcgacag

SEQ ID NO: 3541 - DNA, 33 bp, Homo sapiens
aatcaaatgcagaagarcttttttctaagggat

SEQ ID NO: 3542 - DNA, 33 bp, Homo sapiens
aatcacaataattcacygaccagctataaaata

SEQ ID NO: 3543 - DNA, 33 bp, Homo sapiens
aatcagaccaatacaaygtacaggggacaaaat

SEQ ID NO: 3544 - DNA, 33 bp, Homo sapiens
aatgaaaaattgcagasagtttatctagctcaa

SEQ ID NO: 3545 - DNA, 33 bp, Homo sapiens
aatgaacttaggacgasaaggaaagactaagaa

SEQ ID NO: 3546 - DNA, 33 bp, Homo sapiens
aatgcttggagttaccwgaaaattgatttattc

SEQ ID NO: 3547 - DNA, 33 bp, Homo sapiens
aatgtccctatctcaayacctctttgttctgct

SEQ ID NO: 3548 - DNA, 33 bp, Homo sapiens
catcctgacctgaagtraactttgggtacacag

SEQ ID NO: 3549 - DNA, 33 bp, Homo sapiens
aattagaaaacactgaygtaaatggtatctttc

SEQ ID NO: 3550 - DNA, 33 bp, Homo sapiens
aattggcgtaaggaccraaagagacattatgta

SEQ ID NO: 3551 - DNA, 33 bp, Homo sapiens
aattgtattttaaacamggaacctgcatcagca

SEQ ID NO: 3552 - DNA, 33 bp, Homo sapiens
acaaagaatgttagcayccaagctcaagaacgg

SEQ ID NO: 3553 - DNA, 33 bp, Homo sapiens
acaacagtgaactaaarcaggtagaagtgagtc

SEQ ID NO: 3554 - DNA, 33 bp, Homo sapiens
acaatgcagctttataygtttctaagcattgcc

SEQ ID NO: 3555 - DNA, 33 bp, Homo sapiens
acacacccactttcackgcactattctatctca

SEQ ID NO: 3556 - DNA, 33 bp, Homo sapiens
acaccataattaaaaarttggtcatttgttcca

SEQ ID NO: 3557 - DNA, 33 bp, Homo sapiens
acacttgggagcaaaakgattaagggcggctct

SEQ ID NO: 3558 - DNA, 33 bp, Homo sapiens
acaggcagtgtggtgaraagtgcgaggagccca

SEQ ID NO: 3559 - DNA, 33 bp, Homo sapiens
acagtaggtagaaaatmaaggcctgactgactt

SEQ ID NO: 3560 - DNA, 33 bp, Homo sapiens
acataaatcatcaagamagtatgtagaagtata

SEQ ID NO: 3561 - DNA, 33 bp, Homo sapiens
acataaggaacttaaaytgagcaagcaaaaaac

SEQ ID NO: 3562 - DNA, 33 bp, Homo sapiens
acatgcacctgtctgaratggagagctgagctg

SEQ ID NO: 3563 - DNA, 33 bp, Homo sapiens
acattgatatgataaartgcagtttaaagaatt

SEQ ID NO: 3564 - DNA, 33 bp, Homo sapiens
accaatcagtttaatcrgagaagaataactttg

SEQ ID NO: 3565 - DNA, 33 bp, Homo sapiens
accaatgttaacaagamccttcattctctctat

SEQ ID NO: 3566 - DNA, 33 bp, Homo sapiens
accagctctctccgaaytgccagatctacctct

SEQ ID NO: 3567 - DNA, 33 bp, Homo sapiens
acccctcaacccctgcmaaactcaagaattata

SEQ ID NO: 3568 - DNA, 33 bp, Homo sapiens
accgtgaagctataaartttaaggcatttttgg

SEQ ID NO: 3569 - DNA, 33 bp, Homo sapiens
acctacaatgagagaaragtacatcaaaaggaa

SEQ ID NO: 3570 - DNA, 33 bp, Homo sapiens
acctctgcctcctttayctgtctccctctgagc

SEQ ID NO: 3571 - DNA, 33 bp, Homo sapiens
accttcaacaacttccratggtttactaaatta

SEQ ID NO: 3572 - DNA, 33 bp, Homo sapiens
accttgccagcgagaayttaaaatggttcaatc

SEQ ID NO: 3573 - DNA, 33 bp, Homo sapiens
acctttctacaagcatragaagcaattaaaact

SEQ ID NO: 3574 - DNA, 33 bp, Homo sapiens
acgtggatgtgaggtaygttaccaaataacttc

SEQ ID NO: 3575 - DNA, 33 bp, Homo sapiens
actaagactgattcaaraatttaaggacattta

SEQ ID NO: 3576 - DNA, 33 bp, Homo sapiens
tacgtaaaagaaatgawctagagcagcagtcct

SEQ ID NO: 3577 - DNA, 33 bp, Homo sapiens
actcacctctttaagaractagagggagaaaaa

SEQ ID NO: 3578 - DNA, 33 bp, Homo sapiens
actcagtgtctggtgargtttacttgctggttc

SEQ ID NO: 3579 - DNA, 33 bp, Homo sapiens
actctagaatccaaacrataactcacttgactc

SEQ ID NO: 3580 - DNA, 33 bp, Homo sapiens
ataatactaacattgaraaatggcttccaagca

SEQ ID NO: 3581 - DNA, 33 bp, Homo sapiens
actggtttattgttaayagggctctccgggtcg

SEQ ID NO: 3582 - DNA, 33 bp, Homo sapiens
actgtcttttcaagcargttcaaacaagcctga

SEQ ID NO: 3583 - DNA, 33 bp, Homo sapiens
acttagaaggtagtgayccaatctctcagtgat

SEQ ID NO: 3584 - DNA, 33 bp, Homo sapiens
acttcaaagatttaggragattagcacttcaat

SEQ ID NO: 3585 - DNA, 33 bp, Homo sapiens
acttctcccaaaggttraaattctctgctctat

SEQ ID NO: 3586 - DNA, 33 bp, Homo sapiens
actttaacagtagtgcycgttttggttcatgaa

SEQ ID NO: 3587 - DNA, 33 bp, Homo sapiens
actttgcaaatgagacygctgacttccagagag

SEQ ID NO: 3588 - DNA, 33 bp, Homo sapiens
agaaaattggatgaaastattttgtgtatagag

SEQ ID NO: 3589 - DNA, 33 bp, Homo sapiens
agaaatggagtttgagraaaaggattaggattc

SEQ ID NO: 3590 - DNA, 33 bp, Homo sapiens
agaatcccatcttaaaraccccagggccaggtg

SEQ ID NO: 3591 - DNA, 33 bp, Homo sapiens
agaatggctaaagagayaacccagatgctaggg

SEQ ID NO: 3592 - DNA, 33 bp, Homo sapiens
agaccggcaccatttcrcggggtgttaagaaaa

SEQ ID NO: 3593 - DNA, 33 bp, Homo sapiens
agagtaattatccaaawatcccaatggagccta

SEQ ID NO: 3594 - DNA, 33 bp, Homo sapiens
acttgcatatttataayaggtacgtagcagtat

SEQ ID NO: 3595 - DNA, 33 bp, Homo sapiens
agatatattaagtgccrattaagtccagttgga

SEQ ID NO: 3596 - DNA, 33 bp, Homo sapiens
agattctgcactttgayggaaggagttagaaaa

SEQ ID NO: 3597 - DNA, 33 bp, Homo sapiens
agcacatcctattctcyagtcccgcgggcggct

SEQ ID NO: 3598 - DNA, 33 bp, Homo sapiens
agcagtgtgtttagatyaggcttggtcacgtat

SEQ ID NO: 3599 - DNA, 33 bp, Homo sapiens
agcatgggcctgaatcmaaaatgactggcattc

SEQ ID NO: 3600 - DNA, 33 bp, Homo sapiens
caaaggatctttagacygcacctgaagggagag

SEQ ID NO: 3601 - DNA, 33 bp, Homo sapiens
agcgaataccaaattcsaaataccgggaacctg

SEQ ID NO: 3602 - DNA, 33 bp, Homo sapiens
agcgcatgtaaggctayagttgtcagccaggat

SEQ ID NO: 3603 - DNA, 33 bp, Homo sapiens
agcgtaaatacatgaaygcttctgcttacaagt

SEQ ID NO: 3604 - DNA, 33 bp, Homo sapiens
agctattgatcaggaargtgagatcagctatcc

SEQ ID NO: 3605 - DNA, 33 bp, Homo sapiens
agctctttgaaatacaratccaacaaggccctc

SEQ ID NO: 3606 - DNA, 33 bp, Homo sapiens
agcttaggaatggtaamgcttcattgaattaaa

SEQ ID NO: 3607 - DNA, 33 bp, Homo sapiens
agcttccacatagcaarataaattaccaaggca

SEQ ID NO: 3608 - DNA, 33 bp, Homo sapiens
aggacccgcgtgtatgyatagtggggggcagat

SEQ ID NO: 3609 - DNA, 33 bp, Homo sapiens
aggataaaaccatcacmggaagaataagttcaa

SEQ ID NO: 3610 - DNA, 33 bp, Homo sapiens
aggatagcacagtatgraaaggccatgcttatc

SEQ ID NO: 3611 - DNA, 33 bp, Homo sapiens
agggctctgctgctctkagacccaagttaaatc

SEQ ID NO: 3612 - DNA, 33 bp, Homo sapiens
aggtcttcggggtttcyatctgagggtgtatga

SEQ ID NO: 3613 - DNA, 33 bp, Homo sapiens
aggtgatggtaacccamtgagtttgatattatt

SEQ ID NO: 3614 - DNA, 33 bp, Homo sapiens
aggtgtttgttacgcartgatgactaagataca

SEQ ID NO: 3615 - DNA, 33 bp, Homo sapiens
agtccctgggtgaacartgatgtcttggtttta

SEQ ID NO: 3616 - DNA, 33 bp, Homo sapiens
agtgatattgtcaggastagagatcagaactgg

SEQ ID NO: 3617 - DNA, 33 bp, Homo sapiens
agttaattcactctccyagcaaccacacaacag

SEQ ID NO: 3618 - DNA, 33 bp, Homo sapiens
agttctggcaaactaayagaatccttaaacaca

SEQ ID NO: 3619 - DNA, 33 bp, Homo sapiens
agttgaggttatgaacmaattcacctatgagct

SEQ ID NO: 3620 - DNA, 33 bp, Homo sapiens
ataaaaggataacagaygaggcaacaaattgcc

SEQ ID NO: 3621 - DNA, 33 bp, Homo sapiens
ataaaagtatgcataarcaacaagcataagtat

SEQ ID NO: 3622 - DNA, 33 bp, Homo sapiens
ataaaggatagataaaraagtgaagcaaactaa

SEQ ID NO: 3623 - DNA, 33 bp, Homo sapiens
atacacaagtgctacgwatgtacaaagacatct

SEQ ID NO: 3624 - DNA, 33 bp, Homo sapiens
atactaactatatgtaygcagaaatgctcaaat

SEQ ID NO: 3625 - DNA, 33 bp, Homo sapiens
atacttgtaagactcarataagatcatatgtgt

SEQ ID NO: 3626 - DNA, 33 bp, Homo sapiens
ctaagcacttggcttgyaattgattgataattc

SEQ ID NO: 3627 - DNA, 33 bp, Homo sapiens
atatagatttgatatgyaaaccctgatttgtta

SEQ ID NO: 3628 - DNA, 33 bp, Homo sapiens
atcaactgttataaccrgactgtgactacggca

SEQ ID NO: 3629 - DNA, 33 bp, Homo sapiens
atcagatggtatttgtyaacttactgctctgaa

SEQ ID NO: 3630 - DNA, 33 bp, Homo sapiens
atcatccaccaagcagrcatctttcctgagaag

SEQ ID NO: 3631 - DNA, 33 bp, Homo sapiens
atccctgatcattcaargcattgcttcttcaca

SEQ ID NO: 3632 - DNA, 33 bp, Homo sapiens
atccttgatatacccaygtcaatcttacaaaag

SEQ ID NO: 3633 - DNA, 33 bp, Homo sapiens
atctatctggtagaggycacggatttagttaaa

SEQ ID NO: 3634 - DNA, 33 bp, Homo sapiens
atctctctgtctcagcrctacatacgaagctcc

SEQ ID NO: 3635 - DNA, 33 bp, Homo sapiens
atctgaagagtggtaaytccaattatttgcagt

SEQ ID NO: 3636 - DNA, 33 bp, Homo sapiens
atctgcataattgtaamaatacgaactgtcaag

SEQ ID NO: 3637 - DNA, 33 bp, Homo sapiens
atcttgtattcttgtaygatcacaagccaggag

SEQ ID NO: 3638 - DNA, 33 bp, Homo sapiens
atgacagtaaggataasataaactgcagatgct

SEQ ID NO: 3639 - DNA, 33 bp, Homo sapiens
atgagaacgcaggggaratgtcaggtacttatc

SEQ ID NO: 3640 - DNA, 33 bp, Homo sapiens
atgagctaagctttaakacagagttgggttcat

SEQ ID NO: 3641 - DNA, 33 bp, Homo sapiens
atgatctgctctgaaayagcctcacaaactctc

SEQ ID NO: 3642 - DNA, 33 bp, Homo sapiens
atgcacagcacggttgyagatttttaacattag

SEQ ID NO: 3643 - DNA, 33 bp, Homo sapiens
atgcaggaagggcacargataaggcataggcag

SEQ ID NO: 3644 - DNA, 33 bp, Homo sapiens
atgcatataaagtgccmaacagagatcctgcca

SEQ ID NO: 3645 - DNA, 33 bp, Homo sapiens
atgctagctcatcaaasagaattaactacagta

SEQ ID NO: 3646 - DNA, 33 bp, Homo sapiens
atggctacaggatttgyatttcgaaaattcagt

SEQ ID NO: 3647 - DNA, 33 bp, Homo sapiens
atgggctagtttgaggratttttcagtggtgtt

SEQ ID NO: 3648 - DNA, 33 bp, Homo sapiens
atggggctattgatgcrgattgaatttgcagag

SEQ ID NO: 3649 - DNA, 33 bp, Homo sapiens
atggtagacagtgaaaytcatatctataaaaat

SEQ ID NO: 3650 - DNA, 33 bp, Homo sapiens
atgtgaaaacttttccygataatgaatctctgc

SEQ ID NO: 3651 - DNA, 33 bp, Homo sapiens
atgttagaggttgttayacactttggatcccag

SEQ ID NO: 3652 - DNA, 33 bp, Homo sapiens
atgttcaatatcatccrataagtggtttggaaa

SEQ ID NO: 3653 - DNA, 33 bp, Homo sapiens
attataccataggtggratcaatttcatacaac

SEQ ID NO: 3654 - DNA, 33 bp, Homo sapiens
attatccaaatatcagyccagtacttggcatat

SEQ ID NO: 3655 - DNA, 33 bp, Homo sapiens
attcttccaaagttacyattcttgccagtttac

SEQ ID NO: 3656 - DNA, 33 bp, Homo sapiens
attgacttgttaatgcmaactgaagagttgagg

SEQ ID NO: 3657 - DNA, 33 bp, Homo sapiens
attgatagtgagccacrcattcagtcaatcaac

SEQ ID NO: 3658 - DNA, 33 bp, Homo sapiens
atttgctgtttatcccragagtggctaagatgt

SEQ ID NO: 3659 - DNA, 33 bp, Homo sapiens
attttgtacggttttcmcttacatcctttctat

SEQ ID NO: 3660 - DNA, 33 bp, Homo sapiens
atttttttaagaaatayggtacagatcagttga

SEQ ID NO: 3661 - DNA, 33 bp, Homo sapiens
caaatatggattgcttwaaaattattgaattct

SEQ ID NO: 3662 - DNA, 33 bp, Homo sapiens
caaatcctccatgaacmataaacacacctcttt

SEQ ID NO: 3663 - DNA, 33 bp, Homo sapiens
caaatttcttaacctamcaactctgcatcaaga

SEQ ID NO: 3664 - DNA, 33 bp, Homo sapiens
caagaacatagacagasgatcatgctttcattt

SEQ ID NO: 3665 - DNA, 33 bp, Homo sapiens
caagacatcggtatcakgggcaactagtccaag

SEQ ID NO: 3666 - DNA, 33 bp, Homo sapiens
caagagtctcgttacawtaacctccttgcttca

SEQ ID NO: 3667 - DNA, 33 bp, Homo sapiens
caagtctgtttgagagragtttgttccatagct

SEQ ID NO: 3668 - DNA, 33 bp, Homo sapiens
caatctggctattgaartgtaaacacagaagta

SEQ ID NO: 3669 - DNA, 33 bp, Homo sapiens
caatgttaagcacagasagttgagtagcttctt

SEQ ID NO: 3670 - DNA, 33 bp, Homo sapiens
caattgtacttttggartcataggttagaagga

SEQ ID NO: 3671 - DNA, 33 bp, Homo sapiens
cacatccatctctgtarggctaatgtttcatgt

SEQ ID NO: 3672 - DNA, 33 bp, Homo sapiens
cacatgcttccatcctragattaaaactgcaaa

SEQ ID NO: 3673 - DNA, 33 bp, Homo sapiens
cacatggctgtagtagyagttactcaggaggct

SEQ ID NO: 3674 - DNA, 33 bp, Homo sapiens
cacatgtgtcacctcaygtgattctcaccacag

SEQ ID NO: 3675 - DNA, 33 bp, Homo sapiens
caccatggattagcaamctattatttccaggac

SEQ ID NO: 3676 - DNA, 33 bp, Homo sapiens
cactcattctcatctayatctggcaaagtgcag

SEQ ID NO: 3677 - DNA, 33 bp, Homo sapiens
cactcctgaagcaagcsagactacaaacccacc

SEQ ID NO: 3678 - DNA, 33 bp, Homo sapiens
cactggagaaaatcaamgactgttctctaagtg

SEQ ID NO: 3679 - DNA, 33 bp, Homo sapiens
cacttatgtcagagctkaagtcagtgaaccaaa

SEQ ID NO: 3680 - DNA, 33 bp, Homo sapiens
cagaagcacctaaaacygtagcccaccttacag

SEQ ID NO: 3681 - DNA, 33 bp, Homo sapiens
cagaagtgtgatattcratggagaggcaatcct

SEQ ID NO: 3682 - DNA, 33 bp, Homo sapiens
cagagaatccctcaaayggcccatgtttctgcc

SEQ ID NO: 3683 - DNA, 33 bp, Homo sapiens
cagaggtgagtagttasaaaagaaatcatatgg

SEQ ID NO: 3684 - DNA, 33 bp, Homo sapiens
cagagtttaggagacaygcagggtctgtaggta

SEQ ID NO: 3685 - DNA, 33 bp, Homo sapiens
cagctcctctaagttgwatttatcaaggagaca

SEQ ID NO: 3686 - DNA, 33 bp, Homo sapiens
cagcttctaaatactgmagagtgccagaggact

SEQ ID NO: 3687 - DNA, 33 bp, Homo sapiens
caggacagatctagaayaaaaaccagcgttctt

SEQ ID NO: 3688 - DNA, 33 bp, Homo sapiens
caggacagtatttggaygttaggcttatcagac

SEQ ID NO: 3689 - DNA, 33 bp, Homo sapiens
caggacttaggttcagyatgaggaaaatatctc

SEQ ID NO: 3690 - DNA, 33 bp, Homo sapiens
caggaggtcacatcccygagtttccctgagttt

SEQ ID NO: 3691 - DNA, 33 bp, Homo sapiens
caggataatgctgtaaratgagtgttcagataa

SEQ ID NO: 3692 - DNA, 33 bp, Homo sapiens
caggcaacaaaagatcragcatactacaggcaa

SEQ ID NO: 3693 - DNA, 33 bp, Homo sapiens
cagtagttagaatagarataagttgtggcttca

SEQ ID NO: 3694 - DNA, 33 bp, Homo sapiens
cagtattttctgcatcycatgaacggaagtgag

SEQ ID NO: 3695 - DNA, 33 bp, Homo sapiens
cagtgagtcggtggaaraatgaggataatgacc

SEQ ID NO: 3696 - DNA, 33 bp, Homo sapiens
cagtgcctcgaacaaaygtcaacagagcactct

SEQ ID NO: 3697 - DNA, 33 bp, Homo sapiens
cataatcatctaaaaasgttcttagaggaaaat

SEQ ID NO: 3698 - DNA, 33 bp, Homo sapiens
cataatggacatttgcrccctttaaggaagtaa

SEQ ID NO: 3699 - DNA, 33 bp, Homo sapiens
catgactcactcaaaamcattttcagtcatggc

SEQ ID NO: 3700 - DNA, 33 bp, Homo sapiens
catgcagaatggtgccyacagtaggtcaacaaa

SEQ ID NO: 3701 - DNA, 33 bp, Homo sapiens
catggtgtgtgcttagraagaggaagtgaagat

SEQ ID NO: 3702 - DNA, 33 bp, Homo sapiens
catggttactagaatawctggaaacctagaaaa

SEQ ID NO: 3703 - DNA, 33 bp, Homo sapiens
catgtatttctagtgaycaattcaaattagtac

SEQ ID NO: 3704 - DNA, 33 bp, Homo sapiens
cattatgagagttcccraaggagaagagagaga

SEQ ID NO: 3705 - DNA, 33 bp, Homo sapiens
cattccttttgtcttcraatcatacatctgtgt

SEQ ID NO: 3706 - DNA, 33 bp, Homo sapiens
cattcttgcacacgaarggtaacagcatgacct

SEQ ID NO: 3707 - DNA, 33 bp, Homo sapiens
ccaaatatctacagtaygatcttaccaaatttt

SEQ ID NO: 3708 - DNA, 33 bp, Homo sapiens
ccaactaactgtgcccwattttgaccacagggc

SEQ ID NO: 3709 - DNA, 33 bp, Homo sapiens
ccacagtgaggctaaayaccctggatctcttgg

SEQ ID NO: 3710 - DNA, 33 bp, Homo sapiens
ccacatcctggttggartacccgcagtagggct

SEQ ID NO: 3711 - DNA, 33 bp, Homo sapiens
ccagagtcagcgcccawtatattaaatagagag

SEQ ID NO: 3712 - DNA, 33 bp, Homo sapiens
ccaggagctgaatcacyggcgctttcatcttgg

SEQ ID NO: 3713 - DNA, 33 bp, Homo sapiens
ccagttggtccaatgaraaagaggattagattt

SEQ ID NO: 3714 - DNA, 33 bp, Homo sapiens
cccaaagctacttttcycttgtatcctcggact

SEQ ID NO: 3715 - DNA, 33 bp, Homo sapiens
cccaacaatgccgctakggaatatagtccatat

SEQ ID NO: 3716 - DNA, 33 bp, Homo sapiens
cccaaggtgacccaggraaaaacagcttccgag

SEQ ID NO: 3717 - DNA, 33 bp, Homo sapiens
ccccaacctgtgtggaygtttacatagatcaat

SEQ ID NO: 3718 - DNA, 33 bp, Homo sapiens
ccccacccactctcatyactctctagccctcga

SEQ ID NO: 3719 - DNA, 33 bp, Homo sapiens
aatctgctttgtggctyaaatttttgcttcaag

SEQ ID NO: 3720 - DNA, 33 bp, Homo sapiens
ccccgtgttattattcyaattgtacaggacagg

SEQ ID NO: 3721 - DNA, 33 bp, Homo sapiens
cccgtggaggacaagasaggatgctggtggacc

SEQ ID NO: 3722 - DNA, 33 bp, Homo sapiens
ccctcagggccctaackaatctggctcctagct

SEQ ID NO: 3723 - DNA, 33 bp, Homo sapiens
ccctgcaaagtttctcmaccaacagtgcagata

SEQ ID NO: 3724 - DNA, 33 bp, Homo sapiens
ccctgcttggatactgyagaaagttgcagctct

SEQ ID NO: 3725 - DNA, 33 bp, Homo sapiens
cctcagttatatcttayagaagtcctgccaaga

SEQ ID NO: 3726 - DNA, 33 bp, Homo sapiens
cctcccacttccagcaytgaataaacatgaagg

SEQ ID NO: 3727 - DNA, 33 bp, Homo sapiens
cctctaatggaagaatyagagcgggtcccacag

SEQ ID NO: 3728 - DNA, 33 bp, Homo sapiens
cctctcaggaaatagtracacttaggcccagac

SEQ ID NO: 3729 - DNA, 33 bp, Homo sapiens
cctctggggttggatarcttctcttggctcaat

SEQ ID NO: 3730 - DNA, 33 bp, Homo sapiens
cctgatcctctgtaaasccttaatgaatgtaat

SEQ ID NO: 3731 - DNA, 33 bp, Homo sapiens
cctgctttgggcactayattcctttcatgagca

SEQ ID NO: 3732 - DNA, 33 bp, Homo sapiens
cctggcagttattgaasataccgctctgttatg

SEQ ID NO: 3733 - DNA, 33 bp, Homo sapiens
ccttgccagatttctcyactcggtctattacca

SEQ ID NO: 3734 - DNA, 33 bp, Homo sapiens
cgagttgtgtatctaaytgctctctagaagggc

SEQ ID NO: 3735 - DNA, 33 bp, Homo sapiens
ctaagtgtggttcatgsacaggtaatatcagcg

SEQ ID NO: 3736 - DNA, 33 bp, Homo sapiens
ctaatctacaaagtaayggtcttcaggctttga

SEQ ID NO: 3737 - DNA, 33 bp, Homo sapiens
ctaatctacattcccastgacaatgaaaaaagg

SEQ ID NO: 3738 - DNA, 33 bp, Homo sapiens
ctaggtattctaatggscaaatctctcttttca

SEQ ID NO: 3739 - DNA, 33 bp, Homo sapiens
ctagtaaaactaaagcrctgtaactaaattcat

SEQ ID NO: 3740 - DNA, 33 bp, Homo sapiens
ctattccactctaacarcaagcaggcagtaata

SEQ ID NO: 3741 - DNA, 33 bp, Homo sapiens
ctattctatttaacacrgtaacactgacccttc

SEQ ID NO: 3742 - DNA, 33 bp, Homo sapiens
ctcatttcctgaagacycttccaccaaaatcta

SEQ ID NO: 3743 - DNA, 33 bp, Homo sapiens
ctccaggcaggaggacyattggccatttattga

SEQ ID NO: 3744 - DNA, 33 bp, Homo sapiens
ctccataaaatttttcmaaaactagtgagcaaa

SEQ ID NO: 3745 - DNA, 33 bp, Homo sapiens
ctcccactttggagacrgtaagcaagttaatac

SEQ ID NO: 3746 - DNA, 33 bp, Homo sapiens
aattgattccttaagaytaaaacacaccatatt

SEQ ID NO: 3747 - DNA, 33 bp, Homo sapiens
ctcctctcctcaaatakaagtactgtgggtatt

SEQ ID NO: 3748 - DNA, 33 bp, Homo sapiens
ctcctctcctcagagaytaaagcgtttctcagg

SEQ ID NO: 3749 - DNA, 33 bp, Homo sapiens
ctcctgggactttgaaygtaagcatcttggctg

SEQ ID NO: 3750 - DNA, 33 bp, Homo sapiens
ctcgttccttctggackctctatttccatcaca

SEQ ID NO: 3751 - DNA, 33 bp, Homo sapiens
ctctcaagctctaacartccttgtgcttgggga

SEQ ID NO: 3752 - DNA, 33 bp, Homo sapiens
ctctctcattttctcarggaactcttctgcatc

SEQ ID NO: 3753 - DNA, 33 bp, Homo sapiens
ctctgcctcgaatcaayagacttaatatttaat

SEQ ID NO: 3754 - DNA, 33 bp, Homo sapiens
ctgactccttgcttggmacagtgagctggctcg

SEQ ID NO: 3755 - DNA, 33 bp, Homo sapiens
ctgagggccatgttacratggaggaactgaggc

SEQ ID NO: 3756 - DNA, 33 bp, Homo sapiens
ctgcattcaaacacaayccacaggtcatctcta

SEQ ID NO: 3757 - DNA, 33 bp, Homo sapiens
ctggaaataatgatacmaacggcgatccattac

SEQ ID NO: 3758 - DNA, 33 bp, Homo sapiens
ctggaactgccaggacratggtagcaatttcag

SEQ ID NO: 3759 - DNA, 33 bp, Homo sapiens
ctgggggacacagttayagttactgagtgccta

SEQ ID NO: 3760 - DNA, 33 bp, Homo sapiens
ctggtggtacatacagraactggttttggaagg

SEQ ID NO: 3761 - DNA, 33 bp, Homo sapiens
ctgttcttaggcaccayagtcagtccataaaca

SEQ ID NO: 3762 - DNA, 33 bp, Homo sapiens
cttagaacctatgcttsaaatttcctggctatg

SEQ ID NO: 3763 - DNA, 33 bp, Homo sapiens
cttatggttccatataycttgctgtattttcat

SEQ ID NO: 3764 - DNA, 33 bp, Homo sapiens
cttcatctatctctaaygttgtgacaacacttg

SEQ ID NO: 3765 - DNA, 33 bp, Homo sapiens
cttccgctgcatcctcyataaaaacttaacatg

SEQ ID NO: 3766 - DNA, 33 bp, Homo sapiens
cttctgattggaagaayagtgaatgagattgag

SEQ ID NO: 3767 - DNA, 33 bp, Homo sapiens
cttgggttcctgtgaawgaatacacatctccac

SEQ ID NO: 3768 - DNA, 33 bp, Homo sapiens
cttggtattgtttgtcmcttgattatggccttc

SEQ ID NO: 3769 - DNA, 33 bp, Homo sapiens
cttggtgttaaattgcrcagaaaattaggctac

SEQ ID NO: 3770 - DNA, 33 bp, Homo sapiens
gcgttataaacactgcwcagtaactgatactca

SEQ ID NO: 3771 - DNA, 33 bp, Homo sapiens
cttgtggaatttgttayaaggcttggtctcttg

SEQ ID NO: 3772 - DNA, 33 bp, Homo sapiens
ctttcacttcacactgraccctacaaatgacgt

SEQ ID NO: 3773 - DNA, 33 bp, Homo sapiens
ctttgaacaatgaagarggaggaaaaggtgtca

SEQ ID NO: 3774 - DNA, 33 bp, Homo sapiens
gaaaatgttatcaggaragcaggattaaataag

SEQ ID NO: 3775 - DNA, 33 bp, Homo sapiens
gaaagaagctaatctgraaaggtcacataatgt

SEQ ID NO: 3776 - DNA, 33 bp, Homo sapiens
gaaatcaagtggcaaawatcagatctgagggac

SEQ ID NO: 3777 - DNA, 33 bp, Homo sapiens
gaaatctgcattacaamacccactacccttgtt

SEQ ID NO: 3778 - DNA, 33 bp, Homo sapiens
gaacccctctgttttgyattggcaggtaatgtg

SEQ ID NO: 3779 - DNA, 33 bp, Homo sapiens
gaaccctgaagagaaamctagtgtctaattcaa

SEQ ID NO: 3780 - DNA, 33 bp, Homo sapiens
gaagaggtatcaataartaacttcgatgatgat

SEQ ID NO: 3781 - DNA, 33 bp, Homo sapiens
gaagccattattcacgyaattgatgaacttgga

SEQ ID NO: 3782 - DNA, 33 bp, Homo sapiens
gaagttcaagtttccastgagttatgactgggc

SEQ ID NO: 3783 - DNA, 33 bp, Homo sapiens
attaaacttgctagaaytcctcagtactaatat

SEQ ID NO: 3784 - DNA, 33 bp, Homo sapiens
gaatgtcttcatgatcyaaaggtaaggaaagat

SEQ ID NO: 3785 - DNA, 33 bp, Homo sapiens
gacacctgacatagtargcgataagttctaata

SEQ ID NO: 3786 - DNA, 33 bp, Homo sapiens
gacattctgtaatccayccatttcactcgtgtt

SEQ ID NO: 3787 - DNA, 33 bp, Homo sapiens
gaccattgagttagacmcctgcttcatgtggaa

SEQ ID NO: 3788 - DNA, 33 bp, Homo sapiens
gacctatgctctacaayattagaaacaagcaca

SEQ ID NO: 3789 - DNA, 33 bp, Homo sapiens
gacctgaaggaaaagaktatgatgtaggcacct

SEQ ID NO: 3790 - DNA, 33 bp, Homo sapiens
atttcctgagtgtcgarccccattcctgctcat

SEQ ID NO: 3791 - DNA, 33 bp, Homo sapiens
gactcttgagggagacyatcctggattaatcgg

SEQ ID NO: 3792 - DNA, 33 bp, Homo sapiens
gagaaaaccaaggctcraagtgataaactcatt

SEQ ID NO: 3793 - DNA, 33 bp, Homo sapiens
aacttctcatcccgaawcttttatcagcttcct

SEQ ID NO: 3794 - DNA, 33 bp, Homo sapiens
gagccggagatcatcayagagacagagagagat

SEQ ID NO: 3795 - DNA, 33 bp, Homo sapiens
catcagtttttcatcargcaaaagaaattgaac

SEQ ID NO: 3796 - DNA, 33 bp, Homo sapiens
gaggaaacaaaagtccraggttcactaagtagt

SEQ ID NO: 3797 - DNA, 33 bp, Homo sapiens
gaggctggggataccayatagacagcaggaagg

SEQ ID NO: 3798 - DNA, 33 bp, Homo sapiens
gagtatctagtcaacawataaggaccacaaagt

SEQ ID NO: 3799 - DNA, 33 bp, Homo sapiens
gagtattcttgtacccscttccagaaaggacta

SEQ ID NO: 3800 - DNA, 33 bp, Homo sapiens
gagtgacttgagttgartaataaaatgctggtt

SEQ ID NO: 3801 - DNA, 33 bp, Homo sapiens
gatcctagaaaagttargttgtcttcttcaaga

SEQ ID NO: 3802 - DNA, 33 bp, Homo sapiens
gatctggataaactaartaatctacaggcctta

SEQ ID NO: 3803 - DNA, 33 bp, Homo sapiens
gatctgttcccttcaastggcagtttatatgtt

SEQ ID NO: 3804 - DNA, 33 bp, Homo sapiens
gatgtccatcaccgacrgagtaagagactaata

SEQ ID NO: 3805 - DNA, 33 bp, Homo sapiens
gatgtgggagaaggaargttgtcctgggaatta

SEQ ID NO: 3806 - DNA, 33 bp, Homo sapiens
gattagatgatgcccgyccacattaaggaagga

SEQ ID NO: 3807 - DNA, 33 bp, Homo sapiens
gattcacataggaatgmattaacgatgttagaa

SEQ ID NO: 3808 - DNA, 33 bp, Homo sapiens
gattgaatgtaattccragttaaattccaatga

SEQ ID NO: 3809 - DNA, 33 bp, Homo sapiens
gatttacaattaccaascataaagtaatataaa

SEQ ID NO: 3810 - DNA, 33 bp, Homo sapiens
gatttagtgcccatgaygatgatgaattattag

SEQ ID NO: 3811 - DNA, 33 bp, Homo sapiens
gatttggaatgtcaagkcctgttgatgaataac

SEQ ID NO: 3812 - DNA, 33 bp, Homo sapiens
gcaaactataggatacygggtgaagtggttgat

SEQ ID NO: 3813 - DNA, 33 bp, Homo sapiens
gcaacagcagagtgtarggcaagattccaagcc

SEQ ID NO: 3814 - DNA, 33 bp, Homo sapiens
gcacaccttttagcggkaaaccagacagaaaat

SEQ ID NO: 3815 - DNA, 33 bp, Homo sapiens
gcatcagctcctgttaraccagataacctggag

SEQ ID NO: 3816 - DNA, 33 bp, Homo sapiens
tattagaactccaagcrataactgaatatcaat

SEQ ID NO: 3817 - DNA, 33 bp, Homo sapiens
gcatttgctgcacttaygttctagttcattaaa

SEQ ID NO: 3818 - DNA, 33 bp, Homo sapiens
gccaacattcctcagargaccacttggaaaatc

SEQ ID NO: 3819 - DNA, 33 bp, Homo sapiens
gccaattcacagctacrgctcccaattctagct

SEQ ID NO: 3820 - DNA, 33 bp, Homo sapiens
gcccagctttcctctayctcagaaattctacat

SEQ ID NO: 3821 - DNA, 33 bp, Homo sapiens
gcctcatttataaaacrctggtacggccaaact

SEQ ID NO: 3822 - DNA, 33 bp, Homo sapiens
gcctgatttggatggarcattgaaataaacatc

SEQ ID NO: 3823 - DNA, 33 bp, Homo sapiens
gcctgttaagtgtacayagttgaaatgctttat

SEQ ID NO: 3824 - DNA, 33 bp, Homo sapiens
gctctggcttcattaamcatagtcagtttgcga

SEQ ID NO: 3825 - DNA, 33 bp, Homo sapiens
gctgccctgacactgcygacattttcagattcc

SEQ ID NO: 3826 - DNA, 33 bp, Homo sapiens
gctgtctttccctgcaytattaagctttaacat

SEQ ID NO: 3827 - DNA, 33 bp, Homo sapiens
gctgttcttgtggccgyaatataggatattggt

SEQ ID NO: 3828 - DNA, 33 bp, Homo sapiens
ggaaatatgtgtgggcraaactaatgcctaccc

SEQ ID NO: 3829 - DNA, 33 bp, Homo sapiens
ggaacaaagctggaaasgggcacaagaatccta

SEQ ID NO: 3830 - DNA, 33 bp, Homo sapiens
ggaagagaaagtggtaraccaagtatgaatgtc

SEQ ID NO: 3831 - DNA, 33 bp, Homo sapiens
ggacagctgcatggccrgagaggagcagtgagg

SEQ ID NO: 3832 - DNA, 33 bp, Homo sapiens
ggaccttggctcctaamtgctccagtccagaag

SEQ ID NO: 3833 - DNA, 33 bp, Homo sapiens
ggactccatggtcctaytaaatatgccctaata

SEQ ID NO: 3834 - DNA, 33 bp, Homo sapiens
ggagagcaacatccaamggctggaaggcataac

SEQ ID NO: 3835 - DNA, 33 bp, Homo sapiens
ggagccattgggactaracaattccagaaaaat

SEQ ID NO: 3836 - DNA, 33 bp, Homo sapiens
ggaggatattaaagackgaactaccacaatttc

SEQ ID NO: 3837 - DNA, 33 bp, Homo sapiens
ggagggaacttgattcygaagagaggatagggg

SEQ ID NO: 3838 - DNA, 33 bp, Homo sapiens
ggatgttctgtttagargaagttaagagctgag

SEQ ID NO: 3839 - DNA, 33 bp, Homo sapiens
ggccaaaggggacatargtctgagccctgtacc

SEQ ID NO: 3840 - DNA, 33 bp, Homo sapiens
ggtaaagaggacattaycagcttatgacgtgca

SEQ ID NO: 3841 - DNA, 33 bp, Homo sapiens
gtagacaaccactctawcagtctgtctgagggc

SEQ ID NO: 3842 - DNA, 33 bp, Homo sapiens
gtgaagtataatttccmacttaagaattgagac

SEQ ID NO: 3843 - DNA, 33 bp, Homo sapiens
taaaatcaaatctctcrctttccacaattgaca

SEQ ID NO: 3844 - DNA, 33 bp, Homo sapiens
taagatactccactagraaatccaccccaagac

SEQ ID NO: 3845 - DNA, 33 bp, Homo sapiens
tactgtccctctttcaycagtatttagaaatgg

SEQ ID NO: 3846 - DNA, 33 bp, Homo sapiens
tagtaattatcaattaycatagccttcttcatt

SEQ ID NO: 3847 - DNA, 33 bp, Homo sapiens
tatagctctttggtaayaacagaaaggtcattt

SEQ ID NO: 3848 - DNA, 33 bp, Homo sapiens
ctaatccacattacacygactaattctgtatct

SEQ ID NO: 3849 - DNA, 33 bp, Homo sapiens
tcccctttgcccaaggrataaaatccaaatccc

SEQ ID NO: 3850 - DNA, 33 bp, Homo sapiens
tgaaaccatggctttaracctgggctatatccc

SEQ ID NO: 3851 - DNA, 33 bp, Homo sapiens
tgaggaactgaccagcragggagaaaaataccc

SEQ ID NO: 3852 - DNA, 33 bp, Homo sapiens
tgatgggttcaggcaastggaggaggaatttta

SEQ ID NO: 3853 - DNA, 33 bp, Homo sapiens
tgcaaaaatgataaaayagagttgggatcagtc

SEQ ID NO: 3854 - DNA, 33 bp, Homo sapiens
tggtatattaaaaacaycacgaaatgtgaccca

SEQ ID NO: 3855 - DNA, 33 bp, Homo sapiens
tgtccaggggtgcaacwgctaggatgtatggta

SEQ ID NO: 3856 - DNA, 33 bp, Homo sapiens
gctgatccctgatagcrcagcttcacagagcac

SEQ ID NO: 3857 - DNA, 33 bp, Homo sapiens
ttcaaagtggaaatgawcttaaccttttattca

SEQ ID NO: 3858 - DNA, 33 bp, Homo sapiens
ttgaatgagacaacacrctaaatgatatgtagt

SEQ ID NO: 3859 - DNA, 33 bp, Homo sapiens
tttcattctgagatgcraaatcattgagcagaa

SEQ ID NO: 3860 - DNA, 33 bp, Homo sapiens
ctggaatcgtcaagtcmatccaaagcagaagct

SEQ ID NO: 3861 - DNA, 33 bp, Homo sapiens
tatgtaaggtgggctaragaaatgtttaaaaag

SEQ ID NO: 3862 - DNA, 33 bp, Homo sapiens
gttcactgattactaartctcagtaccaaattc

SEQ ID NO: 3863 - DNA, 33 bp, Homo sapiens
gctgttggtatgtgaasagagtaaaactaaaat

SEQ ID NO: 3864 - DNA, 33 bp, Homo sapiens
gactgggagaacttaarccttgatgagtgagag

SEQ ID NO: 3865 - DNA, 33 bp, Homo sapiens
gttatcaatgtcgaaayttgattaaaacttagc

SEQ ID NO: 3866 - DNA, 33 bp, Homo sapiens
tctgcaatgatgtatcwgaccattcatgttctc

SEQ ID NO: 3867 - DNA, 33 bp, Homo sapiens
agactcaaagatagagmccaaaaaagtgacact

SEQ ID NO: 3868 - DNA, 33 bp, Homo sapiens
aatagtttaacaagtgrcaagagctaacaaatg

SEQ ID NO: 3869 - DNA, 33 bp, Homo sapiens
tgacaaagtttacaagkagggaatcttggagga

SEQ ID NO: 3870 - DNA, 33 bp, Homo sapiens
caattaaaaccgataayagcaagggttgatgag

SEQ ID NO: 3871 - DNA, 33 bp, Homo sapiens
acagtggcaggtattcmcagaatcagacagaaa

SEQ ID NO: 3872 - DNA, 33 bp, Homo sapiens
aaactatatcctacatraatgacccactatatt

SEQ ID NO: 3873 - DNA, 33 bp, Homo sapiens
aagatcccacttttgamgtcattaatttcctat

SEQ ID NO: 3874 - DNA, 33 bp, Homo sapiens
cattatgcacccgtttwtacttggtgtcccaca

SEQ ID NO: 3875 - DNA, 33 bp, Homo sapiens
acaagttgaatctgggkcagtgaacacaatgtc

SEQ ID NO: 3876 - DNA, 33 bp, Homo sapiens
acacaatgaaataaaartgtgctctcacaagag

SEQ ID NO: 3877 - DNA, 33 bp, Homo sapiens
acagttcagttgaaggkaaggtcatttcttgcc

SEQ ID NO: 3878 - DNA, 33 bp, Homo sapiens
accaaattacactggarcaaacaactgaaggtc

SEQ ID NO: 3879 - DNA, 33 bp, Homo sapiens
tcaaaggaattttgcasgtatttacatctctct

SEQ ID NO: 3880 - DNA, 33 bp, Homo sapiens
agaaatgataaagacarcattacacctgacacc

SEQ ID NO: 3881 - DNA, 33 bp, Homo sapiens
agaccttgatgcccaamactggttatgagagca

SEQ ID NO: 3882 - DNA, 33 bp, Homo sapiens
agaggtggctgatgggmaccatatttttgttag

SEQ ID NO: 3883 - DNA, 33 bp, Homo sapiens
agatcatccttactagrcataatgggatttata

SEQ ID NO: 3884 - DNA, 33 bp, Homo sapiens
agccgctgtgtggcackctgacaatgcccttta

SEQ ID NO: 3885 - DNA, 33 bp, Homo sapiens
agctctaatatttatartacccaccacggttgt

SEQ ID NO: 3886 - DNA, 33 bp, Homo sapiens
atccacagatgcaggaragaagttggatagaac

SEQ ID NO: 3887 - DNA, 33 bp, Homo sapiens
atgaagaaaaattggtkaataggcaccagatac

SEQ ID NO: 3888 - DNA, 33 bp, Homo sapiens
atgtttcaaatcgtccragataattttggcatt

SEQ ID NO: 3889 - DNA, 33 bp, Homo sapiens
attttaatccaagagaygtaaccttcaccactg

SEQ ID NO: 3890 - DNA, 33 bp, Homo sapiens
catgttaaggtattaamtgtccacaatggaatt

SEQ ID NO: 3891 - DNA, 33 bp, Homo sapiens
agattccattcaaatarcagggtccattcaaac

SEQ ID NO: 3892 - DNA, 33 bp, Homo sapiens
cgggcaaaggaaaaacrccctagtcattccata

SEQ ID NO: 3893 - DNA, 33 bp, Homo sapiens
cttatcttcaccttatraaaggaccagtttaag

SEQ ID NO: 3894 - DNA, 33 bp, Homo sapiens
cttttgtgccaacttaycatctttgctttccat

SEQ ID NO: 3895 - DNA, 33 bp, Homo sapiens
gaaataaggagagacaratagattgaactgcag

SEQ ID NO: 3896 - DNA, 33 bp, Homo sapiens
gaaatattttataaagrccacaatagagtacca

SEQ ID NO: 3897 - DNA, 33 bp, Homo sapiens
gaagtcatatcaggaartggtagcttgataccc

SEQ ID NO: 3898 - DNA, 33 bp, Homo sapiens
agtcccatggagaagartatcaaatgatgagac

SEQ ID NO: 3899 - DNA, 33 bp, Homo sapiens
gatgatcagaagtctaygtgtccttcaaaaatg

SEQ ID NO: 3900 - DNA, 33 bp, Homo sapiens
gattaggctgccacaakggtcaattcttggtga

SEQ ID NO: 3901 - DNA, 33 bp, Homo sapiens
aggtgactacaaagcaraagcatggaatgtcat

SEQ ID NO: 3902 - DNA, 33 bp, Homo sapiens
ggaggtgctgcactcartcaggtggctcgggtg

SEQ ID NO: 3903 - DNA, 33 bp, Homo sapiens
ggttagcaagtcttcaytagcattttatttaga

SEQ ID NO: 3904 - DNA, 33 bp, Homo sapiens
gtagcacagctgtaggratattgactcctcttc

SEQ ID NO: 3905 - DNA, 33 bp, Homo sapiens
gtagagttgacttttgrccttgttccttgctac

SEQ ID NO: 3906 - DNA, 33 bp, Homo sapiens
catactaattctcacartgcaaggaatttatac

SEQ ID NO: 3907 - DNA, 33 bp, Homo sapiens
gtctaaccaaatcttcyatttgagcaatgatcc

SEQ ID NO: 3908 - DNA, 33 bp, Homo sapiens
gtctttgcaggaatagmataagaaacaagaata

SEQ ID NO: 3909 - DNA, 33 bp, Homo sapiens
gtgaattggcctcgtcyagtcccttgaaggtct

SEQ ID NO: 3910 - DNA, 33 bp, Homo sapiens
gttgaaaagaagttgaygatgttagggattttt

SEQ ID NO: 3911 - DNA, 33 bp, Homo sapiens
gttgctctaaactgagrattcctgggatatcct

SEQ ID NO: 3912 - DNA, 33 bp, Homo sapiens
taaagaaaaacatggargacttagcattcagag

SEQ ID NO: 3913 - DNA, 33 bp, Homo sapiens
actgtggtgtagtgaaracagccgataaccact

SEQ ID NO: 3914 - DNA, 33 bp, Homo sapiens
tgtttttttaaaaaaaygatgtctggtgtgaat

SEQ ID NO: 3915 - DNA, 33 bp, Homo sapiens
tatcctttctagcccawcatgcttagattaaat

SEQ ID NO: 3916 - DNA, 33 bp, Homo sapiens
tattggaggaaatagcygcatgatgcccagctc

SEQ ID NO: 3917 - DNA, 33 bp, Homo sapiens
tatttgtgaattgccaygccaaaagaaaataac

SEQ ID NO: 3918 - DNA, 33 bp, Homo sapiens
tccctccacagccacaygttgcttttagcttgc

SEQ ID NO: 3919 - DNA, 33 bp, Homo sapiens
tctataggagagtttcyctgcaattaagcaaaa

SEQ ID NO: 3920 - DNA, 33 bp, Homo sapiens
tctctatttttgacccractttctgcatttcta

SEQ ID NO: 3921 - DNA, 33 bp, Homo sapiens
tctttaaaatcaatcargaaaactcattttatg

SEQ ID NO: 3922 - DNA, 33 bp, Homo sapiens
tgatgagaccaagtcaygtgcatatggtggatt

SEQ ID NO: 3923 - DNA, 33 bp, Homo sapiens
tgatgctgaatagtcarcaatgccaactttctg

SEQ ID NO: 3924 - DNA, 33 bp, Homo sapiens
tgatgttcggctatgcyaccgacgagacagagg

SEQ ID NO: 3925 - DNA, 33 bp, Homo sapiens
tgcgagtcggtgtagawcatgcacctcagggct

SEQ ID NO: 3926 - DNA, 33 bp, Homo sapiens
tggcctatcatcaacaycttctgatcatctaat

SEQ ID NO: 3927 - DNA, 33 bp, Homo sapiens
ttccctttttatagaaygttctgattagtcact

SEQ ID NO: 3928 - DNA, 33 bp, Homo sapiens
ttgcctatgagtctgtraaaccaaagaaagtaa

SEQ ID NO: 3929 - DNA, 33 bp, Homo sapiens
tttgatcactgaaataytaaagtgatactaaag

SEQ ID NO: 3930 - DNA, 33 bp, Homo sapiens
ttttatcctttatttgwatcccattgtttagaa

SEQ ID NO: 3931 - DNA, 33 bp, Homo sapiens
actatcttcttcccaarttcacaatatgagcca

SEQ ID NO: 3932 - DNA, 33 bp, Homo sapiens
gtaccattcacctcatsagcaaaaagctgtgga

SEQ ID NO: 3933 - DNA, 33 bp, Homo sapiens
caagtgatgagaatackactaaaacagtgtttc

SEQ ID NO: 3934 - DNA, 33 bp, Homo sapiens
tagaaaaaaatgtcaasgagtaggaggttgaag

SEQ ID NO: 3935 - DNA, 33 bp, Homo sapiens
gagaggtggtacacatyaagatctatgctacat

SEQ ID NO: 3936 - DNA, 33 bp, Homo sapiens
gtaccatgactatagaytcctcaaccatctctt

SEQ ID NO: 3937 - DNA, 33 bp, Homo sapiens
atatgagagatttaatraagtgttaaggtatgc

SEQ ID NO: 3938 - DNA, 33 bp, Homo sapiens
gttttaccaataatcamcataaacctaaaacta

SEQ ID NO: 3939 - DNA, 33 bp, Homo sapiens
agatccgcatgggggcrccgcctcttgagcctg

SEQ ID NO: 3940 - DNA, 33 bp, Homo sapiens
tataacttactgagtgmaacaagtgcctctatc

SEQ ID NO: 3941 - DNA, 33 bp, Homo sapiens
tttctgatggcatctascctattacgttctata

SEQ ID NO: 3942 - DNA, 33 bp, Homo sapiens
aaaggagggagtagggkaatagttaattgtgta

SEQ ID NO: 3943 - DNA, 33 bp, Homo sapiens
aaagtcattttttgacyaagaagttggaacaag

SEQ ID NO: 3944 - DNA, 33 bp, Homo sapiens
aactgctgtttgattcraaatgattctttgtgt

SEQ ID NO: 3945 - DNA, 33 bp, Homo sapiens
aagaaagtggtgcaaayttacagtatgtgtatg

SEQ ID NO: 3946 - DNA, 33 bp, Homo sapiens
aaaaagaaaaagaaaaytgagcttatagtacag

SEQ ID NO: 3947 - DNA, 33 bp, Homo sapiens
aaggcgctagagagtaygacttgtggctgttag

SEQ ID NO: 3948 - DNA, 33 bp, Homo sapiens
aagttcttattacgcawcagtcactgtgctaag

SEQ ID NO: 3949 - DNA, 33 bp, Homo sapiens
aatatttatttgagtaycagataagctttggta

SEQ ID NO: 3950 - DNA, 33 bp, Homo sapiens
aatcctcatccccagcraataattattgagtcc

SEQ ID NO: 3951 - DNA, 33 bp, Homo sapiens
aatgcaaaataaaagcyaacatatcccaatatc

SEQ ID NO: 3952 - DNA, 33 bp, Homo sapiens
acaatgccccacattcwagagtattctatctcc

SEQ ID NO: 3953 - DNA, 33 bp, Homo sapiens
acacaccaagctcatcsaccccagtatcccact

SEQ ID NO: 3954 - DNA, 33 bp, Homo sapiens
acatatgagctcattayataactttgtcatata

SEQ ID NO: 3955 - DNA, 33 bp, Homo sapiens
accgctgcaagacctcrcatcagtaattaaagt

SEQ ID NO: 3956 - DNA, 33 bp, Homo sapiens
acctgtcgactttgccrctgtcatgtccatata

SEQ ID NO: 3957 - DNA, 33 bp, Homo sapiens
agactcaatttgagtaygcctttaaagtaagtt

SEQ ID NO: 3958 - DNA, 33 bp, Homo sapiens
agcacttattggattayctcgtttactcctcct

SEQ ID NO: 3959 - DNA, 33 bp, Homo sapiens
agctaaggacttaggckctccccaatactatgt

SEQ ID NO: 3960 - DNA, 33 bp, Homo sapiens
aggaccacggatttcarctccaccctcattgcg

SEQ ID NO: 3961 - DNA, 33 bp, Homo sapiens
aggagtcaatgtcaagratttcacaggggatag

SEQ ID NO: 3962 - DNA, 33 bp, Homo sapiens
ataagagactcttaaaractcattttgaaagcc

SEQ ID NO: 3963 - DNA, 33 bp, Homo sapiens
atattataacactgacmgtcaaaaacatggtta

SEQ ID NO: 3964 - DNA, 33 bp, Homo sapiens
atattgataaatgctayagcacgcttgaaccgc

SEQ ID NO: 3965 - DNA, 33 bp, Homo sapiens
atattggtgaatcacaytgacacagtccctaac

SEQ ID NO: 3966 - DNA, 33 bp, Homo sapiens
atcacactactcagaayggtgatgcacaattta

SEQ ID NO: 3967 - DNA, 33 bp, Homo sapiens
atctggcctgaaggaawtcactgtagtgaggaa

SEQ ID NO: 3968 - DNA, 33 bp, Homo sapiens
attctgttaaatactgycagatttattttttta

SEQ ID NO: 3969 - DNA, 33 bp, Homo sapiens
caaatcaagaagacaartagaatgatgatggcc

SEQ ID NO: 3970 - DNA, 33 bp, Homo sapiens
caacaaaaaagtggaaktagcttaaagaagtat

SEQ ID NO: 3971 - DNA, 33 bp, Homo sapiens
cactgtcatgtccatayacgtatacacacagga

SEQ ID NO: 3972 - DNA, 33 bp, Homo sapiens
cattagaaaggcccccygaagaatccctgtgtc

SEQ ID NO: 3973 - DNA, 33 bp, Homo sapiens
cattcctgaatgtttgmaaatagaagaggcttc

SEQ ID NO: 3974 - DNA, 33 bp, Homo sapiens
atagtcatcgctcttcmcaacatttccgtgtgc

SEQ ID NO: 3975 - DNA, 33 bp, Homo sapiens
ctattgataatccccamgcctcattttagacac

SEQ ID NO: 3976 - DNA, 33 bp, Homo sapiens
ctattttctgggattgrcaatagtaaaaatgac

SEQ ID NO: 3977 - DNA, 33 bp, Homo sapiens
ctcacaactttggtaaytgttaatcagtggtaa

SEQ ID NO: 3978 - DNA, 33 bp, Homo sapiens
ctcccaggcaacagtgyaaatggaattggaaca

SEQ ID NO: 3979 - DNA, 33 bp, Homo sapiens
cttaatcatccgggaakaaataaatgtaccaac

SEQ ID NO: 3980 - DNA, 33 bp, Homo sapiens
ctttctttcctgtgcarattcttgcgggtccct

SEQ ID NO: 3981 - DNA, 33 bp, Homo sapiens
gaaagagattcgaagawcctgctggcttgaaga

SEQ ID NO: 3982 - DNA, 33 bp, Homo sapiens
gaccttttctgatcaarccctgtgtatggctga

SEQ ID NO: 3983 - DNA, 33 bp, Homo sapiens
caaggtcctgaaaagaygggaaatgattagaga

SEQ ID NO: 3984 - DNA, 33 bp, Homo sapiens
gcagtgaactgggggaygagcctgtcaacattg

SEQ ID NO: 3985 - DNA, 33 bp, Homo sapiens
gcatcctatgaggataraagacacagaagataa

SEQ ID NO: 3986 - DNA, 33 bp, Homo sapiens
gcctgtgacattaggaygattattttacctttc

SEQ ID NO: 3987 - DNA, 33 bp, Homo sapiens
gcttgcagtttaaaaawttttgctttagtgtac

SEQ ID NO: 3988 - DNA, 33 bp, Homo sapiens
gcttgcttcagacatarccctgagaaatggccc

SEQ ID NO: 3989 - DNA, 33 bp, Homo sapiens
ggagctctgtgccatgycaaaggaggagacgag

SEQ ID NO: 3990 - DNA, 33 bp, Homo sapiens
gtacttctctcataaasctattgtgaggattag

SEQ ID NO: 3991 - DNA, 33 bp, Homo sapiens
taacatcttggaatgasaggccaacaatagaca

SEQ ID NO: 3992 - DNA, 33 bp, Homo sapiens
taggagactacctaaartgatcttcagattcca

SEQ ID NO: 3993 - DNA, 33 bp, Homo sapiens
ggcctgtcaaatgcaartgcgtatgtgaatgtg

SEQ ID NO: 3994 - DNA, 33 bp, Homo sapiens
ggctggggccaacaaasggcaagcagaagtcaa

SEQ ID NO: 3995 - DNA, 33 bp, Homo sapiens
ggctgtacatttgctckactcacttcagatatc

SEQ ID NO: 3996 - DNA, 33 bp, Homo sapiens
ggcttaaggtgtcatcragtgccaaaaaggaga

SEQ ID NO: 3997 - DNA, 33 bp, Homo sapiens
gggatgaatgagttcaragtcttgcaaaaggga

SEQ ID NO: 3998 - DNA, 33 bp, Homo sapiens
gggatgcgcataatgayatagtgatgaattcaa

SEQ ID NO: 3999 - DNA, 33 bp, Homo sapiens
gggatgtggtactgagrccaaggaagaacagga

SEQ ID NO: 4000 - DNA, 33 bp, Homo sapiens
gggatgttcatcgcagraaggaaattactgagt

SEQ ID NO: 4001 - DNA, 33 bp, Homo sapiens
ggggaatcaaagatctmaatcagagggtgcttt

SEQ ID NO: 4002 - DNA, 33 bp, Homo sapiens
gggtagggtaaagacamcttcagacttgctccc

SEQ ID NO: 4003 - DNA, 33 bp, Homo sapiens
ggtaaaaatcatatatraaatggccacagttaa

SEQ ID NO: 4004 - DNA, 33 bp, Homo sapiens
ggtatactggtatgtayggcgtgaagaaaagag

SEQ ID NO: 4005 - DNA, 33 bp, Homo sapiens
ggtcatcgaccagtacrgcatcccacaggtaag

SEQ ID NO: 4006 - DNA, 33 bp, Homo sapiens
ggtccaattagcatgaygtcaccaatatagtgg

SEQ ID NO: 4007 - DNA, 33 bp, Homo sapiens
ggtccagctttatttcrcactaggctgtgaggt

SEQ ID NO: 4008 - DNA, 33 bp, Homo sapiens
ggtctgcccagggaaaraaagacactgaagacc

SEQ ID NO: 4009 - DNA, 33 bp, Homo sapiens
ggtgcattaacagctcrctgcagatttgcaact

SEQ ID NO: 4010 - DNA, 33 bp, Homo sapiens
gtagatagaaaaagggkagatattggtcaaaat

SEQ ID NO: 4011 - DNA, 33 bp, Homo sapiens
gtagtgcatcttgctargggttttatgatattg

SEQ ID NO: 4012 - DNA, 33 bp, Homo sapiens
gtatgcaatgccacagmaattttacagttcagg

SEQ ID NO: 4013 - DNA, 33 bp, Homo sapiens
gtattgtttaacttccraatcctgaagaatgga

SEQ ID NO: 4014 - DNA, 33 bp, Homo sapiens
gtcactgtatgttacaytgcattttgtagaatt

SEQ ID NO: 4015 - DNA, 33 bp, Homo sapiens
gtcctacacttaggaasaggtactaccaaattc

SEQ ID NO: 4016 - DNA, 33 bp, Homo sapiens
aagagctgcctcctcayaacaggtcaagtgcta

SEQ ID NO: 4017 - DNA, 33 bp, Homo sapiens
gtctggttttctatgayggtaactcagctgtaa

SEQ ID NO: 4018 - DNA, 33 bp, Homo sapiens
gtcttttcactaatcayaaataaagcacgaaga

SEQ ID NO: 4019 - DNA, 33 bp, Homo sapiens
gtgaacttggaattgcratagcactaatacaac

SEQ ID NO: 4020 - DNA, 33 bp, Homo sapiens
gtgacaagtgcagtgaygaaaaataaagctagg

SEQ ID NO: 4021 - DNA, 33 bp, Homo sapiens
gtgactggataggagamagccacaaaacgacaa

SEQ ID NO: 4022 - DNA, 33 bp, Homo sapiens
gtgacttaacgtagtaygagaactgttgagctt

SEQ ID NO: 4023 - DNA, 33 bp, Homo sapiens
gtgatcaaggttaacamcaccagttataagtta

SEQ ID NO: 4024 - DNA, 33 bp, Homo sapiens
gtgatgaaactccactragcaacagaataggcc

SEQ ID NO: 4025 - DNA, 33 bp, Homo sapiens
gtgattcaaacgctaakgatacaggagctaaaa

SEQ ID NO: 4026 - DNA, 33 bp, Homo sapiens
gtgcagagcaccatgargatcaaacctgcattc

SEQ ID NO: 4027 - DNA, 33 bp, Homo sapiens
gtgctttaagaactcgyagctctggccgggcca

SEQ ID NO: 4028 - DNA, 33 bp, Homo sapiens
gtggcttaaacaccaamcatcagattaattcat

SEQ ID NO: 4029 - DNA, 33 bp, Homo sapiens
ccccaaatgtttgcatmataaacccattgccta

SEQ ID NO: 4030 - DNA, 33 bp, Homo sapiens
gttacttcctacatacratgggggcataggcat

SEQ ID NO: 4031 - DNA, 33 bp, Homo sapiens
gttagagcacattaaarcaactttggctactgt

SEQ ID NO: 4032 - DNA, 33 bp, Homo sapiens
gttctctttttgtcacyctatctcaagggctgg

SEQ ID NO: 4033 - DNA, 33 bp, Homo sapiens
gttctttgaagctttcyattggttacaattcca

SEQ ID NO: 4034 - DNA, 33 bp, Homo sapiens
gttgaattccactgacwggaaagcattaagtaa

SEQ ID NO: 4035 - DNA, 33 bp, Homo sapiens
gttgctctttttaaaartctcaaccaatacaga

SEQ ID NO: 4036 - DNA, 33 bp, Homo sapiens
gttggagtaaagtgaaygaaataatcagaatgt

SEQ ID NO: 4037 - DNA, 33 bp, Homo sapiens
gttgtccaagtgaccaygggtagcctcgatgct

SEQ ID NO: 4038 - DNA, 33 bp, Homo sapiens
gtttcatgcctcttcawtctgatttccttatac

SEQ ID NO: 4039 - DNA, 33 bp, Homo sapiens
gttttatgtcagattgmatggtcaattttagaa

SEQ ID NO: 4040 - DNA, 33 bp, Homo sapiens
gttttggtagagcaackgatcccttccatcccc

SEQ ID NO: 4041 - DNA, 33 bp, Homo sapiens
taaaacacaagggaaasgatagatgacaatacc

SEQ ID NO: 4042 - DNA, 33 bp, Homo sapiens
taaaggtaatatctccrgcatcgccttgatacc

SEQ ID NO: 4043 - DNA, 33 bp, Homo sapiens
taaagtttagaaacacraaaacattgacataat

SEQ ID NO: 4044 - DNA, 33 bp, Homo sapiens
taaatacaaaggattcraaatttacagtttaca

SEQ ID NO: 4045 - DNA, 33 bp, Homo sapiens
taaatgtagttcaaatyatacgtctatcaaatt

SEQ ID NO: 4046 - DNA, 33 bp, Homo sapiens
taacttacactcatgamatcagctcaggattca

SEQ ID NO: 4047 - DNA, 33 bp, Homo sapiens
taacttgtcttcaccawccttcactaaccccaa

SEQ ID NO: 4048 - DNA, 33 bp, Homo sapiens
taagcaaagccaggatmatcattcttattccat

SEQ ID NO: 4049 - DNA, 33 bp, Homo sapiens
taagcactgcaataccrctacagtcgatctgat

SEQ ID NO: 4050 - DNA, 33 bp, Homo sapiens
taaggagcttgttgaaratcactgaactggtga

SEQ ID NO: 4051 - DNA, 33 bp, Homo sapiens
taaggatgtcgtgtaarcatatcattaatgtag

SEQ ID NO: 4052 - DNA, 33 bp, Homo sapiens
taattatgaaagtttcmatagtgattccaggca

SEQ ID NO: 4053 - DNA, 33 bp, Homo sapiens
tactcttatgaatcctraagttatcttgaaagg

SEQ ID NO: 4054 - DNA, 33 bp, Homo sapiens
tactgctgggttttaartcttgcctctgccctt

SEQ ID NO: 4055 - DNA, 33 bp, Homo sapiens
tagactctccataccaraaaaggccacaagaaa

SEQ ID NO: 4056 - DNA, 33 bp, Homo sapiens
tagcaattggctgaacracttattttaagctag

SEQ ID NO: 4057 - DNA, 33 bp, Homo sapiens
tagggacatctgagaamctacattcactgaggt

SEQ ID NO: 4058 - DNA, 33 bp, Homo sapiens
tagtacctcattataasagcctgaactaagaca

SEQ ID NO: 4059 - DNA, 33 bp, Homo sapiens
tagtcaagtcaatcagkcctaccatctcctatc

SEQ ID NO: 4060 - DNA, 33 bp, Homo sapiens
tagtcagaagaaggggratttcctgactattca

SEQ ID NO: 4061 - DNA, 33 bp, Homo sapiens
tagtcaggctcccttcrctttccagaaacaagc

SEQ ID NO: 4062 - DNA, 33 bp, Homo sapiens
tagtctcctttccccastcttgccacccatttt

SEQ ID NO: 4063 - DNA, 33 bp, Homo sapiens
tataaggctacatcaamgtataggacaaatttg

SEQ ID NO: 4064 - DNA, 33 bp, Homo sapiens
tatagaataacgctgargagctgaaatgaatct

SEQ ID NO: 4065 - DNA, 33 bp, Homo sapiens
tatatttgagttctacrattccctgttcactca

SEQ ID NO: 4066 - DNA, 33 bp, Homo sapiens
tatcaccaagttattascagtgcttcaaaaaat

SEQ ID NO: 4067 - DNA, 33 bp, Homo sapiens
tatccatcattttcccwcaagactgacagctga

SEQ ID NO: 4068 - DNA, 33 bp, Homo sapiens
tatccttttaacctgcrctttaataaatgttaa

SEQ ID NO: 4069 - DNA, 33 bp, Homo sapiens
tatgtcttgctcttgayctaatgctgagggaaa

SEQ ID NO: 4070 - DNA, 33 bp, Homo sapiens
tattaccccaggcgaayaatgccacttcactaa

SEQ ID NO: 4071 - DNA, 33 bp, Homo sapiens
aggttgcctttgcatgsagaacagggtacaaga

SEQ ID NO: 4072 - DNA, 33 bp, Homo sapiens
tattggacaatgccacygaagtagtgaaagaga

SEQ ID NO: 4073 - DNA, 33 bp, Homo sapiens
tattggtagaaaagtawctcagcctttttatct

SEQ ID NO: 4074 - DNA, 33 bp, Homo sapiens
gccacacccttagccartcttgggctggatttc

SEQ ID NO: 4075 - DNA, 33 bp, Homo sapiens
tatttccaagtgcacakacattgatgggtttgc

SEQ ID NO: 4076 - DNA, 33 bp, Homo sapiens
tatttctctactgtgcygatactgtgtccacac

SEQ ID NO: 4077 - DNA, 33 bp, Homo sapiens
tattttactcaggatargagagtcaacattgca

SEQ ID NO: 4078 - DNA, 33 bp, Homo sapiens
tattttctatgtcagamacttcacatttaaaaa

SEQ ID NO: 4079 - DNA, 33 bp, Homo sapiens
tcaaaaatcagttgacsctatgtgtggctgtat

SEQ ID NO: 4080 - DNA, 33 bp, Homo sapiens
agtgccagaattagacyctctcctccagactag

SEQ ID NO: 4081 - DNA, 33 bp, Homo sapiens
tcaagaaattgactacrgccaggatctccccat

SEQ ID NO: 4082 - DNA, 33 bp, Homo sapiens
tcaatagttcaaaactsaatgctactaaaggat

SEQ ID NO: 4083 - DNA, 33 bp, Homo sapiens
tcacattgcacactaaygtaatccgtcggcagc

SEQ ID NO: 4084 - DNA, 33 bp, Homo sapiens
tcacctaagcctcacaytgagagaagttcttcc

SEQ ID NO: 4085 - DNA, 33 bp, Homo sapiens
tcactcactagcccaawgtttctctgttgctgc

SEQ ID NO: 4086 - DNA, 33 bp, Homo sapiens
tcagcttgactaattcraaaatatttaccatgt

SEQ ID NO: 4087 - DNA, 33 bp, Homo sapiens
tcagtcaccctatggargtatcgtgtcttgcca

SEQ ID NO: 4088 - DNA, 33 bp, Homo sapiens
tcattttctgaagggargtttcagcttttatca

SEQ ID NO: 4089 - DNA, 33 bp, Homo sapiens
tccaattttgagtgtawgcaaatctgtgttttt

SEQ ID NO: 4090 - DNA, 33 bp, Homo sapiens
tccccaatggttatcargtagagcactctctag

SEQ ID NO: 4091 - DNA, 33 bp, Homo sapiens
tccctgggcacaaccargttagacaagccagaa

SEQ ID NO: 4092 - DNA, 33 bp, Homo sapiens
tcctcatgaatgtgtaygaaacttgtgaatatc

SEQ ID NO: 4093 - DNA, 33 bp, Homo sapiens
tcctctaccaagcaaartgactaattaagctgg

SEQ ID NO: 4094 - DNA, 33 bp, Homo sapiens
tcctctcacttttatayagccattggttgggtt

SEQ ID NO: 4095 - DNA, 33 bp, Homo sapiens
tcctgtctcaaagaggyaatatagtgtgaattg

SEQ ID NO: 4096 - DNA, 33 bp, Homo sapiens
tccttctaataatatcracatacagaaagcttt

SEQ ID NO: 4097 - DNA, 33 bp, Homo sapiens
tctaccaggacccaacmataacgctactggggt

SEQ ID NO: 4098 - DNA, 33 bp, Homo sapiens
tctattcagttaatgcwacattcaaagggatca

SEQ ID NO: 4099 - DNA, 33 bp, Homo sapiens
tctctcttgttgtttayagtgtttgttgctgta

SEQ ID NO: 4100 - DNA, 33 bp, Homo sapiens
tctggaaaaaaggatgyaactccagttctgcca

SEQ ID NO: 4101 - DNA, 33 bp, Homo sapiens
tcttaatcctcttggcraatagatgaggagtct

SEQ ID NO: 4102 - DNA, 33 bp, Homo sapiens
tcttcataatgtcaagkcctaaccaagaacgct

SEQ ID NO: 4103 - DNA, 33 bp, Homo sapiens
tcttccagctactctamcttcttcccagcagtt

SEQ ID NO: 4104 - DNA, 33 bp, Homo sapiens
tctttatgaaattcaargtagtccagttttctt

SEQ ID NO: 4105 - DNA, 33 bp, Homo sapiens
tgaaggagggctttccraaggagtaaagaatta

SEQ ID NO: 4106 - DNA, 33 bp, Homo sapiens
tgaccaaaatttaccaygattttcctgattctg

SEQ ID NO: 4107 - DNA, 33 bp, Homo sapiens
tgactaaggtagtggaygaacaaatgtaaacat

SEQ ID NO: 4108 - DNA, 33 bp, Homo sapiens
tgagagggctgatctartaagttgagctcttct

SEQ ID NO: 4109 - DNA, 33 bp, Homo sapiens
tgagcccctgctaagcygatgaggtaggcagtg

SEQ ID NO: 4110 - DNA, 33 bp, Homo sapiens
tgaggagtatgatggamgatgctctagaaattc

SEQ ID NO: 4111 - DNA, 33 bp, Homo sapiens
tgagtgagttaccatasaacctgagctgcccat

SEQ ID NO: 4112 - DNA, 33 bp, Homo sapiens
tgagttacgcaaaaggkatgtgaaacataaatg

SEQ ID NO: 4113 - DNA, 33 bp, Homo sapiens
tgatagggagaccgacrgagacaggtgaaagca

SEQ ID NO: 4114 - DNA, 33 bp, Homo sapiens
tgatgaaggagaattcrgaatagggaaatttgt

SEQ ID NO: 4115 - DNA, 33 bp, Homo sapiens
tgattgaccattcccawaatcctacagccttta

SEQ ID NO: 4116 - DNA, 33 bp, Homo sapiens
tgcacagcccacaataygaactgtttatagatt

SEQ ID NO: 4117 - DNA, 33 bp, Homo sapiens
tgccctggttagaggargcttgtgagatggagg

SEQ ID NO: 4118 - DNA, 33 bp, Homo sapiens
tgcgccagggtttgtaygtcaagtgtcaaacat

SEQ ID NO: 4119 - DNA, 33 bp, Homo sapiens
tggaaaaaacaagaggycacttttgagccagga

SEQ ID NO: 4120 - DNA, 33 bp, Homo sapiens
tggaaatagcagataakgcaccttaatgcacct

SEQ ID NO: 4121 - DNA, 33 bp, Homo sapiens
tggagggacctcacaayattttgctgaacgaaa

SEQ ID NO: 4122 - DNA, 33 bp, Homo sapiens
tggcaataatcaaaaartagtaggtgttggcat

SEQ ID NO: 4123 - DNA, 33 bp, Homo sapiens
tgggctatgcctagaasctgtagttgatgataa

SEQ ID NO: 4124 - DNA, 33 bp, Homo sapiens
tggggagaagaaaggcrcttacaagaaaacaga

SEQ ID NO: 4125 - DNA, 33 bp, Homo sapiens
tgggtaaagggctctcyatgcagtaaatggtac

SEQ ID NO: 4126 - DNA, 33 bp, Homo sapiens
tggtgtctctcttaaasgcaaggcttgtgtctt

SEQ ID NO: 4127 - DNA, 33 bp, Homo sapiens
tgtagatctttttctgragccttagtaagttta

SEQ ID NO: 4128 - DNA, 33 bp, Homo sapiens
tgtcacgattgcctacrgtacagtataaacttc

SEQ ID NO: 4129 - DNA, 33 bp, Homo sapiens
tgtctcatgtgaatcamgacagataccagttaa

SEQ ID NO: 4130 - DNA, 33 bp, Homo sapiens
tgtcttttcatggctcrctagtgcatttcttta

SEQ ID NO: 4131 - DNA, 33 bp, Homo sapiens
tgtgcgcagaagcagcmgattaacggaagaaca

SEQ ID NO: 4132 - DNA, 33 bp, Homo sapiens
tgtgctttccaaaagaratttgtatgcacaggc

SEQ ID NO: 4133 - DNA, 33 bp, Homo sapiens
tgtggaactggacccgragagaacaggaaggag

SEQ ID NO: 4134 - DNA, 33 bp, Homo sapiens
tgtggaggcaaatactraaattatctgctagga

SEQ ID NO: 4135 - DNA, 33 bp, Homo sapiens
tgtggccggcctctackgaaaccagatgaatct

SEQ ID NO: 4136 - DNA, 33 bp, Homo sapiens
tgtgtagctgaggtagraagagtgcctgatccc

SEQ ID NO: 4137 - DNA, 33 bp, Homo sapiens
tgtgtatgtgtgtgtawcctggtgaatagatgt

SEQ ID NO: 4138 - DNA, 33 bp, Homo sapiens
tgtgtctagatgaataygcacaaattaaatgcc

SEQ ID NO: 4139 - DNA, 33 bp, Homo sapiens
tgtgtgctaaattaggsaaaagttagtaaatat

SEQ ID NO: 4140 - DNA, 33 bp, Homo sapiens
tgtgtttggattcactraggaaaagagtaaaag

SEQ ID NO: 4141 - DNA, 33 bp, Homo sapiens
tgttcaagccactaaarttgtggtagcttgttg

SEQ ID NO: 4142 - DNA, 33 bp, Homo sapiens
tgttctacatccacctsaagtgtgcaggccttt

SEQ ID NO: 4143 - DNA, 33 bp, Homo sapiens
tgtttgttgaatggacrcaaaatcttatttata

SEQ ID NO: 4144 - DNA, 33 bp, Homo sapiens
tgttttgtaacagacarggaaactagagtatgg

SEQ ID NO: 4145 - DNA, 33 bp, Homo sapiens
tgtttttgatccacaaygagttgaatccgtaga

SEQ ID NO: 4146 - DNA, 33 bp, Homo sapiens
ttaagaaagcaagttgmaatgtatgacaaaaat

SEQ ID NO: 4147 - DNA, 33 bp, Homo sapiens
ttacgggataacaacaygctctctcaaccccgg

SEQ ID NO: 4148 - DNA, 33 bp, Homo sapiens
ttactagattttcaacrctctagcttcagcttt

SEQ ID NO: 4149 - DNA, 33 bp, Homo sapiens
ttagaacactggcccaygtggaggacgtttatc

SEQ ID NO: 4150 - DNA, 33 bp, Homo sapiens
ttagagactcaagagamctcgacagtaatcaga

SEQ ID NO: 4151 - DNA, 33 bp, Homo sapiens
ttagctcaggtgttackgacttctttgaggagt

SEQ ID NO: 4152 - DNA, 33 bp, Homo sapiens
ttataatggggaagaaratatatgtggcatcag

SEQ ID NO: 4153 - DNA, 33 bp, Homo sapiens
ttcacactactagtcgraatgtaaagtgatgca

SEQ ID NO: 4154 - DNA, 33 bp, Homo sapiens
ttcacatattttcccamacttcatctattccta

SEQ ID NO: 4155 - DNA, 33 bp, Homo sapiens
ttcagagtgattgtaaraggcctgcatgatgca

SEQ ID NO: 4156 - DNA, 33 bp, Homo sapiens
ttcatacactgttcccycacctggacaattctt

SEQ ID NO: 4157 - DNA, 33 bp, Homo sapiens
ttcatataccacaaaaycagtcacttgcaatga

SEQ ID NO: 4158 - DNA, 33 bp, Homo sapiens
ttcatggtcagccaaarattcaagggaacccag

SEQ ID NO: 4159 - DNA, 33 bp, Homo sapiens
ttcattcactcagccargagatatttctggagc

SEQ ID NO: 4160 - DNA, 33 bp, Homo sapiens
ttcatttaatggaatcrgatgtcacaaaaatac

SEQ ID NO: 4161 - DNA, 33 bp, Homo sapiens
ttcctcctaggagtgasagtgaaataatctgaa

SEQ ID NO: 4162 - DNA, 33 bp, Homo sapiens
ttcctgtctgtgatcartgaaaggcatcttcta

SEQ ID NO: 4163 - DNA, 33 bp, Homo sapiens
ctgtgaacaaccaacayggaaagcattaagaaa

SEQ ID NO: 4164 - DNA, 33 bp, Homo sapiens
ttctctactgccatgasggatctaacagcactc

SEQ ID NO: 4165 - DNA, 33 bp, Homo sapiens
ttctctcctttccaaamtgagtcatggaataac

SEQ ID NO: 4166 - DNA, 33 bp, Homo sapiens
ttctgcaggaagagagragaggggtttggccct

SEQ ID NO: 4167 - DNA, 33 bp, Homo sapiens
agatgctgaaggagagrcccagagttcacagtc

SEQ ID NO: 4168 - DNA, 33 bp, Homo sapiens
ttcttagctttgacgamtataccatgatattgt

SEQ ID NO: 4169 - DNA, 33 bp, Homo sapiens
ttcttcacttaacatcyacatgactttccatct

SEQ ID NO: 4170 - DNA, 33 bp, Homo sapiens
ttgaaagtttgctagasaaagaaagttttttca

SEQ ID NO: 4171 - DNA, 33 bp, Homo sapiens
ttgacatatgcacagakgatctcttttgattct

SEQ ID NO: 4172 - DNA, 33 bp, Homo sapiens
ttgacttaatgtgaaaraatacatacaggagaa

SEQ ID NO: 4173 - DNA, 33 bp, Homo sapiens
ttgagaattattcacawcccagctgatccttgg

SEQ ID NO: 4174 - DNA, 33 bp, Homo sapiens
ttgagccagctgttacyagaagttgtccattga

SEQ ID NO: 4175 - DNA, 33 bp, Homo sapiens
ttgatagtaatttgtawcacagtgctgtggctg

SEQ ID NO: 4176 - DNA, 33 bp, Homo sapiens
ttgcgggttcagtgaasaggtagattcttggac

SEQ ID NO: 4177 - DNA, 33 bp, Homo sapiens
ttgctataccctcaacyaagctctgcatttaaa

SEQ ID NO: 4178 - DNA, 33 bp, Homo sapiens
ttgctgagtaagcaaayatagcatttttcttca

SEQ ID NO: 4179 - DNA, 33 bp, Homo sapiens
ttggaccttgaattgcycttaaatcacacatgc

SEQ ID NO: 4180 - DNA, 33 bp, Homo sapiens
tttaaaatcttgccccwacattagattacttag

SEQ ID NO: 4181 - DNA, 33 bp, Homo sapiens
tttaggcaaatagaggkaaagcagagaactttc

SEQ ID NO: 4182 - DNA, 33 bp, Homo sapiens
tttatgggtattaccaygatttattttccatta

SEQ ID NO: 4183 - DNA, 33 bp, Homo sapiens
tttatgtgctttttggrcatttggagaaaaaaa

SEQ ID NO: 4184 - DNA, 33 bp, Homo sapiens
tttcagaacgatagacrctgagccatctaaagc

SEQ ID NO: 4185 - DNA, 33 bp, Homo sapiens
tttgaaaactgatcacragtaagagattttagt

SEQ ID NO: 4186 - DNA, 33 bp, Homo sapiens
tttgttctaaatgtcarcttggcttggtggttg

SEQ ID NO: 4187 - DNA, 33 bp, Homo sapiens
ttttcttggaagtatcrataaatgtgtatgtaa

SEQ ID NO: 4188 - DNA, 33 bp, Homo sapiens
ttttgaaaacattaagycccaataagccttttg

SEQ ID NO: 4189 - DNA, 33 bp, Homo sapiens
ttttgattactgactcmactgcttttcttattg

SEQ ID NO: 4190 - DNA, 33 bp, Homo sapiens
ttttgattttcttctgwcaaagaccacagcagt

SEQ ID NO: 4191 - DNA, 33 bp, Homo sapiens
ttttgtcaacctgttcyaagaaaataatcctaa

SEQ ID NO: 4192 - DNA, 33 bp, Homo sapiens
tttttaaataatgacasagatgcccaaaagaaa

SEQ ID NO: 4193 - DNA, 33 bp, Homo sapiens
tttttgtgataatcagyccaaactatgacaact

SEQ ID NO: 4194 - DNA, 33 bp, Homo sapiens
tttttgtttagaaaccrgaatgttggagattaa

SEQ ID NO: 4195 - DNA, 33 bp, Homo sapiens
ctgctgagtcatcaaamgaaaacactcactcaa

SEQ ID NO: 4196 - DNA, 33 bp, Homo sapiens
agatgcttctgtttccrgagccgaaagtataag

SEQ ID NO: 4197 - DNA, 33 bp, Homo sapiens
tgttcctttaacccccygattgcaccctgaatc

SEQ ID NO: 4198 - DNA, 33 bp, Homo sapiens
ccatgcgttcttaataygctttcaaagatttct

SEQ ID NO: 4199 - DNA, 33 bp, Homo sapiens
aaggcagtgaactagtracaaataggatgactt

SEQ ID NO: 4200 - DNA, 33 bp, Homo sapiens
ttattctgcctttatcyagtttttcttcttggt

SEQ ID NO: 4201 - DNA, 33 bp, Homo sapiens
tatatgtgaaatacccraacttggaatgcattt

SEQ ID NO: 4202 - DNA, 33 bp, Homo sapiens
caaataatgcttggaartgtgctttagttttct

SEQ ID NO: 4203 - DNA, 33 bp, Homo sapiens
tgcacagattgtttcaygctttgagtcacataa

SEQ ID NO: 4204 - DNA, 33 bp, Homo sapiens
tatgtgctgagtcataygtagagtgctaattat

SEQ ID NO: 4205 - DNA, 33 bp, Homo sapiens
tgctgaatatctctgtraagccttgctatatat

SEQ ID NO: 4206 - DNA, 33 bp, Homo sapiens
ctcacagctgtaataaytgagcttcagatttgc

SEQ ID NO: 4207 - DNA, 33 bp, Homo sapiens
tgttattagctgtagarccaaccactgtatgat

SEQ ID NO: 4208 - DNA, 33 bp, Homo sapiens
ttgctcaatccctgtcycagattttcatgagca

SEQ ID NO: 4209 - DNA, 33 bp, Homo sapiens
attaatggacttcagtwaccagaccctggttcc

SEQ ID NO: 4210 - DNA, 33 bp, Homo sapiens
tctgccattggcactgrcaaaacctcccaaaca

SEQ ID NO: 4211 - DNA, 33 bp, Homo sapiens
tcaactaaaaatctctracttccgtcttcccta

SEQ ID NO: 4212 - DNA, 33 bp, Homo sapiens
acaagccaggccagctractatagcacagaatg

SEQ ID NO: 4213 - DNA, 33 bp, Homo sapiens
ggatcccatgtggaatraaccatgttaccagga

SEQ ID NO: 4214 - DNA, 33 bp, Homo sapiens
aacatttaagggcaggraaagctaatagtaatt

SEQ ID NO: 4215 - DNA, 33 bp, Homo sapiens
ccagctctgaaaagttyaaaattttgctacacc

SEQ ID NO: 4216 - DNA, 33 bp, Homo sapiens
ttacctggtaatctcartgaagagagaactaac

SEQ ID NO: 4217 - DNA, 33 bp, Homo sapiens
aaagacttacaaacaartgcttatagagccttt

SEQ ID NO: 4218 - DNA, 33 bp, Homo sapiens
actgcaggtctttttasctactacaagagtttg

SEQ ID NO: 4219 - DNA, 33 bp, Homo sapiens
gagactttggagtgtgkactgttcggttaatat

SEQ ID NO: 4220 - DNA, 33 bp, Homo sapiens
atcctccatccttgacyatttcagatacagtca

SEQ ID NO: 4221 - DNA, 33 bp, Homo sapiens
tctaaccaaatcaccartcaaaggtgagggcaa

SEQ ID NO: 4222 - DNA, 33 bp, Homo sapiens
tcccacccacctacatmagacattgaggatgcc

SEQ ID NO: 4223 - DNA, 33 bp, Homo sapiens
tataactgttatatgcmctggaaacatttaaaa

SEQ ID NO: 4224 - DNA, 33 bp, Homo sapiens
gcaacagcaatatcctstttcagaactagcgct

SEQ ID NO: 4225 - DNA, 33 bp, Homo sapiens
aaacttgacttgtaaayctaaggaaggatcaag

SEQ ID NO: 4226 - DNA, 33 bp, Homo sapiens
tgataataaccataacrtctacgaacaggtgaa

SEQ ID NO: 4227 - DNA, 33 bp, Homo sapiens
ttggccccccagttcayagacagtgactgctca

SEQ ID NO: 4228 - DNA, 33 bp, Homo sapiens
ctcatctctctctttcyacaatccctagactgt

SEQ ID NO: 4229 - DNA, 33 bp, Homo sapiens
attcattattgccaaaratttctagaggacatg

SEQ ID NO: 4230 - DNA, 33 bp, Homo sapiens
gctatcgtgctaggacragaatccacccctcag

SEQ ID NO: 4231 - DNA, 33 bp, Homo sapiens
agagtgtgctcaagtgwaatcgacaaccagtaa

SEQ ID NO: 4232 - DNA, 33 bp, Homo sapiens
gttttactgaagaagaygacggattgaattgac

SEQ ID NO: 4233 - DNA, 33 bp, Homo sapiens
aattctaactgcctcckgaaggtctcactccaa

SEQ ID NO: 4234 - DNA, 33 bp, Homo sapiens
tagttttgttcaggacsacagactgagaactac

SEQ ID NO: 4235 - DNA, 33 bp, Homo sapiens
aaacaaaaataagcggsccccatcttaaatctt

SEQ ID NO: 4236 - DNA, 33 bp, Homo sapiens
ctccctaggactctcgwcaaataaccaggaaat

SEQ ID NO: 4237 - DNA, 33 bp, Homo sapiens
aaacacccagagggatyatagagccaggcagta

SEQ ID NO: 4238 - DNA, 33 bp, Homo sapiens
tataatcgaagccacasgagtctcggcaaaaca

SEQ ID NO: 4239 - DNA, 33 bp, Homo sapiens
acatttattggtctagyagccaagaggagcagt

SEQ ID NO: 4240 - DNA, 33 bp, Homo sapiens
caaggatggttcttaakgaagggaaagtgttcc

SEQ ID NO: 4241 - DNA, 33 bp, Homo sapiens
tatagctgagaaaaccraggtacaatgaggtta

SEQ ID NO: 4242 - DNA, 33 bp, Homo sapiens
acaggccttttgaatcmactactcatatcaatg

SEQ ID NO: 4243 - DNA, 33 bp, Homo sapiens
ggatttcagagggtcaygatggtgccaggctat

SEQ ID NO: 4244 - DNA, 33 bp, Homo sapiens
tctttagtattttccastagccagggaggctga

SEQ ID NO: 4245 - DNA, 33 bp, Homo sapiens
ttacttcccaaatccartctttccagctgggtc

SEQ ID NO: 4246 - DNA, 33 bp, Homo sapiens
cctcctcaaacctacaycacaagttacaggcaa

SEQ ID NO: 4247 - DNA, 33 bp, Homo sapiens
cgacatttttaaaagcwcattagagttgacata

SEQ ID NO: 4248 - DNA, 33 bp, Homo sapiens
taatacatgatttggaytcaatacaaaggataa

SEQ ID NO: 4249 - DNA, 33 bp, Homo sapiens
aagcaccaggttacacraattgcctgaattttc

SEQ ID NO: 4250 - DNA, 33 bp, Homo sapiens
tggcccctttgtaccayattatgctgctgcact

SEQ ID NO: 4251 - DNA, 33 bp, Homo sapiens
ctgtcgtgtttaggaaygtccacctattactgt

SEQ ID NO: 4252 - DNA, 33 bp, Homo sapiens
gcaccttctccatgagycattaaagaggcttct

SEQ ID NO: 4253 - DNA, 33 bp, Homo sapiens
acactggttctgaagcraatgagctctaggtat

SEQ ID NO: 4254 - DNA, 33 bp, Homo sapiens
aaaaattgttatgacakcatttgacttctagtt

SEQ ID NO: 4255 - DNA, 33 bp, Homo sapiens
gcatggtgtctgcaacmggaaggatttcattgc

SEQ ID NO: 4256 - DNA, 33 bp, Homo sapiens
aaaaaaatgaagtgacractgctttcaaaagat

SEQ ID NO: 4257 - DNA, 33 bp, Homo sapiens
gaaggtggaagaaaaaygtccttactagtatgc

SEQ ID NO: 4258 - DNA, 33 bp, Homo sapiens
cataattaacagaaacyagtatggatcttgtat

SEQ ID NO: 4259 - DNA, 33 bp, Homo sapiens
tattctataaaggttaygcaggtagaaacaaga

SEQ ID NO: 4260 - DNA, 33 bp, Homo sapiens
atcttccaattcattamatctctctacagatct

SEQ ID NO: 4261 - DNA, 33 bp, Homo sapiens
agtatgtacaccattargtactttgctgtcttc

SEQ ID NO: 4262 - DNA, 33 bp, Homo sapiens
attgaccacaccctcaycccaagtcaaatcact

SEQ ID NO: 4263 - DNA, 33 bp, Homo sapiens
aatgaccacaataacaytaacttgaagtggatg

SEQ ID NO: 4264 - DNA, 33 bp, Homo sapiens
aagcatgaataaaagcratgtctaacaaatgtc

SEQ ID NO: 4265 - DNA, 33 bp, Homo sapiens
gcagtctcagccttcaygtctttaaaactaaca

SEQ ID NO: 4266 - DNA, 33 bp, Homo sapiens
tattagtcagggtaaaytacacaagctgcagta

SEQ ID NO: 4267 - DNA, 33 bp, Homo sapiens
atgcagccaggaaggargctataccttgcgaag

SEQ ID NO: 4268 - DNA, 33 bp, Homo sapiens
acatatctccaggtgaycaagacgggaaagaca

SEQ ID NO: 4269 - DNA, 33 bp, Homo sapiens
aaaaaaaaccgaaaaastgatcattatcatatg

SEQ ID NO: 4270 - DNA, 33 bp, Homo sapiens
aaaaagaattcacccamgcttacatagctagta

SEQ ID NO: 4271 - DNA, 33 bp, Homo sapiens
aaaaagcagtctctcaracaaattgtattagga

SEQ ID NO: 4272 - DNA, 33 bp, Homo sapiens
aaaatcctggataatcwctgatgactctgaaca

SEQ ID NO: 4273 - DNA, 33 bp, Homo sapiens
aaaattatctctaaaakgcaagttagatggtgc

SEQ ID NO: 4274 - DNA, 33 bp, Homo sapiens
aaaattgaagcgataawaggttagcctggattt

SEQ ID NO: 4275 - DNA, 33 bp, Homo sapiens
aaacacattcaggaaartcacagtatacaaaat

SEQ ID NO: 4276 - DNA, 33 bp, Homo sapiens
aaacctcatgccatccyatttagactaatttta

SEQ ID NO: 4277 - DNA, 33 bp, Homo sapiens
aaacggcattacactcyagacctggaggcttga

SEQ ID NO: 4278 - DNA, 33 bp, Homo sapiens
aaactcttgaatagtakgttttgactgctacag

SEQ ID NO: 4279 - DNA, 33 bp, Homo sapiens
aaacttcacatcattaraaacattcggctgagt

SEQ ID NO: 4280 - DNA, 33 bp, Homo sapiens
aaagttgagttctctgyaaggttagatgactgg

SEQ ID NO: 4281 - DNA, 33 bp, Homo sapiens
aaataaattgaattggycagtctagcttgcaaa

SEQ ID NO: 4282 - DNA, 33 bp, Homo sapiens
aaatgtaagtttggaargaaagataattgactt

SEQ ID NO: 4283 - DNA, 33 bp, Homo sapiens
aaattcaaatttactaygaaatgtcgatagagt

SEQ ID NO: 4284 - DNA, 33 bp, Homo sapiens
aacatccaacaacaaakatccaattaaataaag

SEQ ID NO: 4285 - DNA, 33 bp, Homo sapiens
aacatctcataaatacrcagaaatacagaaagt

SEQ ID NO: 4286 - DNA, 33 bp, Homo sapiens
aacattgcaggaaagamatttgtttaaccttgt

SEQ ID NO: 4287 - DNA, 33 bp, Homo sapiens
aaccaccatcatctcastatctcttgtcttgta

SEQ ID NO: 4288 - DNA, 33 bp, Homo sapiens
aaccttgtcctgtgaayggaaatgaaagttcta

SEQ ID NO: 4289 - DNA, 33 bp, Homo sapiens
aacctttgtatgagccyattagctgcctcagct

SEQ ID NO: 4290 - DNA, 33 bp, Homo sapiens
aactattactacatacrgcaaccactgggaagg

SEQ ID NO: 4291 - DNA, 33 bp, Homo sapiens
aacttttacagacaacrcaagaacacgctaaaa

SEQ ID NO: 4292 - DNA, 33 bp, Homo sapiens
aagacagcagccaaatkatgttattctgaagtg

SEQ ID NO: 4293 - DNA, 33 bp, Homo sapiens
aagaggagaacttcaaktcaattctcagggtgc

SEQ ID NO: 4294 - DNA, 33 bp, Homo sapiens
aagcaccatatttgtcyagaaaaaccacctctc

SEQ ID NO: 4295 - DNA, 33 bp, Homo sapiens
aagccagagaccttaastagtattttcagtctc

SEQ ID NO: 4296 - DNA, 33 bp, Homo sapiens
aagcccttacttcagayagttattgtgcagatg

SEQ ID NO: 4297 - DNA, 33 bp, Homo sapiens
aagctctgaaatgagayggtttggctagttggg

SEQ ID NO: 4298 - DNA, 33 bp, Homo sapiens
aagctgctgtccaaagrcggaatgtattctctc

SEQ ID NO: 4299 - DNA, 33 bp, Homo sapiens
aagcttatagatgaacyagtgatatgtgcataa

SEQ ID NO: 4300 - DNA, 33 bp, Homo sapiens
aagcttattcctacaaytcaaacagagccccca

SEQ ID NO: 4301 - DNA, 33 bp, Homo sapiens
aaggacgtttatccacrctgtagtgctgcttct

SEQ ID NO: 4302 - DNA, 33 bp, Homo sapiens
aaggacttcatacgtgmaatgctcccccttttc

SEQ ID NO: 4303 - DNA, 33 bp, Homo sapiens
aaggcagaatttcagayggatgaactagtgaag

SEQ ID NO: 4304 - DNA, 33 bp, Homo sapiens
aagggatgtcatcatgwaacataaataaagttg

SEQ ID NO: 4305 - DNA, 33 bp, Homo sapiens
aagtagatatgcactcyactggaaaaacatcac

SEQ ID NO: 4306 - DNA, 33 bp, Homo sapiens
aagtatggtctgcagaygaacaatatgagcctg

SEQ ID NO: 4307 - DNA, 33 bp, Homo sapiens
aagttttcattaaacartctttccagtggagaa

SEQ ID NO: 4308 - DNA, 33 bp, Homo sapiens
aataaggtaaaattcarataagcttgcagttaa

SEQ ID NO: 4309 - DNA, 33 bp, Homo sapiens
aataattcaactgggayggcagattagaaattt

SEQ ID NO: 4310 - DNA, 33 bp, Homo sapiens
aataattgtaatgatcratcaatccagaacttt

SEQ ID NO: 4311 - DNA, 33 bp, Homo sapiens
aataccaataacagccyacttcattagattctc

SEQ ID NO: 4312 - DNA, 33 bp, Homo sapiens
aatacgaaacattatcraggctcccttttttta

SEQ ID NO: 4313 - DNA, 33 bp, Homo sapiens
aatataatgtaagtaaytgatggtggctttggt

SEQ ID NO: 4314 - DNA, 33 bp, Homo sapiens
aatatccaagacaattwaaaaaagtcctccaag

SEQ ID NO: 4315 - DNA, 33 bp, Homo sapiens
aatatgtgaactaatargcataagcagaatggg

SEQ ID NO: 4316 - DNA, 33 bp, Homo sapiens
aatcctgccaaaaaaamcaattgtgagcatgtc

SEQ ID NO: 4317 - DNA, 33 bp, Homo sapiens
aatctcagatcatttamctacatcaaacatctc

SEQ ID NO: 4318 - DNA, 33 bp, Homo sapiens
aatggatgttttcttayaggaagcggatgaaca

SEQ ID NO: 4319 - DNA, 33 bp, Homo sapiens
aatggcattacacagcrcactattacggcaggt

SEQ ID NO: 4320 - DNA, 33 bp, Homo sapiens
aatgtagagcctgagarcctaaggaagtatctg

SEQ ID NO: 4321 - DNA, 33 bp, Homo sapiens
aattatagcagacatcrctttcaatttgctcca

SEQ ID NO: 4322 - DNA, 33 bp, Homo sapiens
aattcacatagaaaaaygagcaagtaagaattg

SEQ ID NO: 4323 - DNA, 33 bp, Homo sapiens
aattcttttggcaatayatctagaaatggagtt

SEQ ID NO: 4324 - DNA, 33 bp, Homo sapiens
aattgagaggtggatayctgaggacaaggaaac

SEQ ID NO: 4325 - DNA, 33 bp, Homo sapiens
aattttctcaccttagragttaattttgtttca

SEQ ID NO: 4326 - DNA, 33 bp, Homo sapiens
acaaaaaactaaaatasagtccatttggtccag

SEQ ID NO: 4327 - DNA, 33 bp, Homo sapiens
acaacttggttgtcagragattgtggatagcac

SEQ ID NO: 4328 - DNA, 33 bp, Homo sapiens
acaaggcaaatgttcayggactgatggaaggtt

SEQ ID NO: 4329 - DNA, 33 bp, Homo sapiens
acaagtcagaaccagcygaagggaaagatgcat

SEQ ID NO: 4330 - DNA, 33 bp, Homo sapiens
acaataccagagaggayagcactacacagagaa

SEQ ID NO: 4331 - DNA, 33 bp, Homo sapiens
acaatagctgagagaartatacctacaattatt

SEQ ID NO: 4332 - DNA, 33 bp, Homo sapiens
acaatcattcagaccaytgggccttggctaaga

SEQ ID NO: 4333 - DNA, 33 bp, Homo sapiens
acacaattgcctttagraaagaatgatcagtgc

SEQ ID NO: 4334 - DNA, 33 bp, Homo sapiens
acacatcctctacagamgctaaaaccaaagata

SEQ ID NO: 4335 - DNA, 33 bp, Homo sapiens
acactgattctgcagakagttggcaatttcttc

SEQ ID NO: 4336 - DNA, 33 bp, Homo sapiens
acactgtcttgtggtawgtgccttaagattgaa

SEQ ID NO: 4337 - DNA, 33 bp, Homo sapiens
acagattggtaggcatrataacttgcatttcta

SEQ ID NO: 4338 - DNA, 33 bp, Homo sapiens
acagcattcctgggccyagtcaagacaggattc

SEQ ID NO: 4339 - DNA, 33 bp, Homo sapiens
acatttaggtataaackcaaagtcatttcaacc

SEQ ID NO: 4340 - DNA, 33 bp, Homo sapiens
accaagccatttataargaaatcacctccatga

SEQ ID NO: 4341 - DNA, 33 bp, Homo sapiens
accactctgtgagctaygtcctatggaacaaga

SEQ ID NO: 4342 - DNA, 33 bp, Homo sapiens
acctctcacctcagcarattcttcagtaataat

SEQ ID NO: 4343 - DNA, 33 bp, Homo sapiens
acctgagattttcaaargatggatagaaattca

SEQ ID NO: 4344 - DNA, 33 bp, Homo sapiens
accttcctgatccccartagacatcaaaatcat

SEQ ID NO: 4345 - DNA, 33 bp, Homo sapiens
accttgttttaaatggycaaatggtatcctact

SEQ ID NO: 4346 - DNA, 33 bp, Homo sapiens
acgtccagcctaaacamgtaagttacaaataaa

SEQ ID NO: 4347 - DNA, 33 bp, Homo sapiens
tgatgaggaagatgaamaaatcaggagcttgtt

SEQ ID NO: 4348 - DNA, 33 bp, Homo sapiens
actcaaagaagagtgaygaaaattaagttctgg

SEQ ID NO: 4349 - DNA, 33 bp, Homo sapiens
actcctgccttcttatsaaagctgcaggccttg

SEQ ID NO: 4350 - DNA, 33 bp, Homo sapiens
actcgacaaatgcttasgaagctttgactgtgt

SEQ ID NO: 4351 - DNA, 33 bp, Homo sapiens
actgaaccctgaccaamctttgcttttgcagac

SEQ ID NO: 4352 - DNA, 33 bp, Homo sapiens
actgacccatatttaargagtcaatcttgctaa

SEQ ID NO: 4353 - DNA, 33 bp, Homo sapiens
actgagacagaatgcargtattagcaaggggac

SEQ ID NO: 4354 - DNA, 33 bp, Homo sapiens
acttaagagctctaaastgaaaaacctggattg

SEQ ID NO: 4355 - DNA, 33 bp, Homo sapiens
acttagtgtggtcgccraagataaatccacccc

SEQ ID NO: 4356 - DNA, 33 bp, Homo sapiens
acttctgcaccaggacrctggagtctgccgtcc

SEQ ID NO: 4357 - DNA, 33 bp, Homo sapiens
acttgaattttatcagyaaggatccggacaggt

SEQ ID NO: 4358 - DNA, 33 bp, Homo sapiens
agaaagaggatgttaayggaaaaactggcaaaa

SEQ ID NO: 4359 - DNA, 33 bp, Homo sapiens
agaatggctagatccamatagtctatctgggcc

SEQ ID NO: 4360 - DNA, 33 bp, Homo sapiens
agacaaaagtgataaasttgattcatgcttgga

SEQ ID NO: 4361 - DNA, 33 bp, Homo sapiens
agacacacttctcctakctttgaggataaagac

SEQ ID NO: 4362 - DNA, 33 bp, Homo sapiens
agacatattgggctgawatattataactctagg

SEQ ID NO: 4363 - DNA, 33 bp, Homo sapiens
agagaatcacttgtacraacttttctcattctc

SEQ ID NO: 4364 - DNA, 33 bp, Homo sapiens
agagaggaattgaaaasgctgtcagcttttata

SEQ ID NO: 4365 - DNA, 33 bp, Homo sapiens
agagggctagtatgcartgacttcttattgaaa

SEQ ID NO: 4366 - DNA, 33 bp, Homo sapiens
agataatggttgtaaamtgcttggcagaagtct

SEQ ID NO: 4367 - DNA, 33 bp, Homo sapiens
agatacttacaaattasattagtgcctactgca

SEQ ID NO: 4368 - DNA, 33 bp, Homo sapiens
agatacttggggctccrattctaagagaacctg

SEQ ID NO: 4369 - DNA, 33 bp, Homo sapiens
agatatagatggtaacratgtttgcacaacatg

SEQ ID NO: 4370 - DNA, 33 bp, Homo sapiens
agatttgagcctacgasgtattttgttttcacc

SEQ ID NO: 4371 - DNA, 33 bp, Homo sapiens
agcaaatgtaaagtgtyaaggagataatgtgaa

SEQ ID NO: 4372 - DNA, 33 bp, Homo sapiens
agcaagaaagtcctcgycagatgccggcaccat

SEQ ID NO: 4373 - DNA, 33 bp, Homo sapiens
agcacctctatcagtasaacagcgtttctccac

SEQ ID NO: 4374 - DNA, 33 bp, Homo sapiens
agcagaaaacagcccasgtgtcattaatagtag

SEQ ID NO: 4375 - DNA, 33 bp, Homo sapiens
agcagagaaaggtataygtatgtcaaaggaaat

SEQ ID NO: 4376 - DNA, 33 bp, Homo sapiens
agcattatctatggcawcctaagatttttattt

SEQ ID NO: 4377 - DNA, 33 bp, Homo sapiens
agctactgactcattcrccttcccccagccaag

SEQ ID NO: 4378 - DNA, 33 bp, Homo sapiens
agctgcaggttttacaygactgtggtggatcca

SEQ ID NO: 4379 - DNA, 33 bp, Homo sapiens
aggaaagatggaaccastagaatgcaagaagaa

SEQ ID NO: 4380 - DNA, 33 bp, Homo sapiens
aggaacaaatgagagaragaagcccagcctctc

SEQ ID NO: 4381 - DNA, 33 bp, Homo sapiens
aggaagttcaggtgccmactgagaaatccagat

SEQ ID NO: 4382 - DNA, 33 bp, Homo sapiens
aggacttgcatgaataygaaataaatttgtact

SEQ ID NO: 4383 - DNA, 33 bp, Homo sapiens
aggagggccgaaggacrcaaattttattcagtt

SEQ ID NO: 4384 - DNA, 33 bp, Homo sapiens
aggatctgcttcacccraaactaaaggtacatt

SEQ ID NO: 4385 - DNA, 33 bp, Homo sapiens
aggcaaaagagatagcragagcggtggggggtt

SEQ ID NO: 4386 - DNA, 33 bp, Homo sapiens
aggccattcttagcaaragatgaatatcatgtg

SEQ ID NO: 4387 - DNA, 33 bp, Homo sapiens
aggctgcagagagataygaagagttttacattg

SEQ ID NO: 4388 - DNA, 33 bp, Homo sapiens
aggctggcgcctcttcyaccacaagggaggctg

SEQ ID NO: 4389 - DNA, 33 bp, Homo sapiens
aggctgtggtcactaawctgtaatgcatcttta

SEQ ID NO: 4390 - DNA, 33 bp, Homo sapiens
agggatcttggacgtasataggtataagcaaag

SEQ ID NO: 4391 - DNA, 33 bp, Homo sapiens
agggtgattggcataargataaatttttgataa

SEQ ID NO: 4392 - DNA, 33 bp, Homo sapiens
aggtaagggagttcagracaaggccattcatga

SEQ ID NO: 4393 - DNA, 33 bp, Homo sapiens
aggtagggaggaaggarcagtagcagaatctcc

SEQ ID NO: 4394 - DNA, 33 bp, Homo sapiens
aggtggaagagaaaacygtatcatgattgtgag

SEQ ID NO: 4395 - DNA, 33 bp, Homo sapiens
agtaaatgaactaatcyataagtgtggttatgg

SEQ ID NO: 4396 - DNA, 33 bp, Homo sapiens
agtattagactatagcrgactcaaattcttagc

SEQ ID NO: 4397 - DNA, 33 bp, Homo sapiens
agtctatacaagctcaytaatccatacctcaac

SEQ ID NO: 4398 - DNA, 33 bp, Homo sapiens
agtgagtcactcaggaycttgatattgtttttt

SEQ ID NO: 4399 - DNA, 33 bp, Homo sapiens
agttgtgccaataagaraagactacctgggact

SEQ ID NO: 4400 - DNA, 33 bp, Homo sapiens
ataaaatgacactaacygaagttttacacaaag

SEQ ID NO: 4401 - DNA, 33 bp, Homo sapiens
ataaacatagctcctascctcgaagagcctccg

SEQ ID NO: 4402 - DNA, 33 bp, Homo sapiens
ataaataaagttggagyataaggcagtgtagtc

SEQ ID NO: 4403 - DNA, 33 bp, Homo sapiens
ataaggtactggaaacygaggaattgctttact

SEQ ID NO: 4404 - DNA, 33 bp, Homo sapiens
ataataacaagagatcracactagaaaagacag

SEQ ID NO: 4405 - DNA, 33 bp, Homo sapiens
atacaagccatcgatamattgctctaacaagcc

SEQ ID NO: 4406 - DNA, 33 bp, Homo sapiens
atacatattttagcagkagatgagtatccctta

SEQ ID NO: 4407 - DNA, 33 bp, Homo sapiens
atagaaaactttgacargtgataggtatcgtct

SEQ ID NO: 4408 - DNA, 33 bp, Homo sapiens
atcagagttcaaagtcraaagcttcccaagaac

SEQ ID NO: 4409 - DNA, 33 bp, Homo sapiens
atctcagtgttgttacsaggattagaggagcta

SEQ ID NO: 4410 - DNA, 33 bp, Homo sapiens
atctgatgtatcctagwactctgcaaaacacca

SEQ ID NO: 4411 - DNA, 33 bp, Homo sapiens
atcttaacgaatcttgmaacagctctagataag

SEQ ID NO: 4412 - DNA, 33 bp, Homo sapiens
atgaagctctagattasatatcacaaaacacaa

SEQ ID NO: 4413 - DNA, 33 bp, Homo sapiens
atgagtaagtctacagraataatgtcataatga

SEQ ID NO: 4414 - DNA, 33 bp, Homo sapiens
atgatttgatagaaaasacaaaaccataggaga

SEQ ID NO: 4415 - DNA, 33 bp, Homo sapiens
atgcaagtattcaaacycagccaattgtataca

SEQ ID NO: 4416 - DNA, 33 bp, Homo sapiens
atgccatcttatctgamagcacttccctgaccc

SEQ ID NO: 4417 - DNA, 33 bp, Homo sapiens
atggaatgggaccaaawtataacagaaagcagt

SEQ ID NO: 4418 - DNA, 33 bp, Homo sapiens
atgtcagctgccatcaytccttatggaaaaccc

SEQ ID NO: 4419 - DNA, 33 bp, Homo sapiens
atgtccctgaaatcccrctacttcagacctgaa

SEQ ID NO: 4420 - DNA, 33 bp, Homo sapiens
atgtcctaagaacttartaagcctttgttcaag

SEQ ID NO: 4421 - DNA, 33 bp, Homo sapiens
atgtctctgaatcttcracaacactcgttaatt

SEQ ID NO: 4422 - DNA, 33 bp, Homo sapiens
atgttaaatggacaaargagtacaagcttccca

SEQ ID NO: 4423 - DNA, 33 bp, Homo sapiens
atgttggcaaaacaaayatctctgagatgcagt

SEQ ID NO: 4424 - DNA, 33 bp, Homo sapiens
atgtttatttttcaacygatgtcatgtttttca

SEQ ID NO: 4425 - DNA, 33 bp, Homo sapiens
attactctaactcaaartacttgcacagcacct

SEQ ID NO: 4426 - DNA, 33 bp, Homo sapiens
attagtatacagtggcrattaacagaagcagaa

SEQ ID NO: 4427 - DNA, 33 bp, Homo sapiens
attatatcctgtacatkacttcaaaactgtgat

SEQ ID NO: 4428 - DNA, 33 bp, Homo sapiens
attcctctcttatgtckagattccactttcatt

SEQ ID NO: 4429 - DNA, 33 bp, Homo sapiens
attcctggtactggtargctaaaccatgttttg

SEQ ID NO: 4430 - DNA, 33 bp, Homo sapiens
attctgtttttagttcragggccattgtttatt

SEQ ID NO: 4431 - DNA, 33 bp, Homo sapiens
attgtaggaacaaatayctatgtgagttgaaga

SEQ ID NO: 4432 - DNA, 33 bp, Homo sapiens
attgtgttcaataaaaycctttcataattttac

SEQ ID NO: 4433 - DNA, 33 bp, Homo sapiens
attgtttcttgacataygattactttaatttgt

SEQ ID NO: 4434 - DNA, 33 bp, Homo sapiens
atttaaatgaagccgtraagtgtgtttagggtg

SEQ ID NO: 4435 - DNA, 33 bp, Homo sapiens
attttgagtcatgaaarttaccttcctacagag

SEQ ID NO: 4436 - DNA, 33 bp, Homo sapiens
attttttcaattcaacyagattttctggggagg

SEQ ID NO: 4437 - DNA, 33 bp, Homo sapiens
caaaagcacgggtaacsaatgcaaaaattgata

SEQ ID NO: 4438 - DNA, 33 bp, Homo sapiens
caaaatattatctttcrccatgcccagaggaag

SEQ ID NO: 4439 - DNA, 33 bp, Homo sapiens
caaagaacgcttaatgkaaggaagaagtattag

SEQ ID NO: 4440 - DNA, 33 bp, Homo sapiens
caaagtaatgtgagtasgatccctgcaaagttc

SEQ ID NO: 4441 - DNA, 33 bp, Homo sapiens
caaatggcctgcaatgkagtgttcggtaagggt

SEQ ID NO: 4442 - DNA, 33 bp, Homo sapiens
caaattaaaaccaaaaygaagtatcgcctcaca

SEQ ID NO: 4443 - DNA, 33 bp, Homo sapiens
caactgtagtggataaygtcaagttgtttttct

SEQ ID NO: 4444 - DNA, 33 bp, Homo sapiens
caagcatatctgaatcragaaaagcagacatga

SEQ ID NO: 4445 - DNA, 33 bp, Homo sapiens
caaggacgaaagatacrcaaccaagggaatcac

SEQ ID NO: 4446 - DNA, 33 bp, Homo sapiens
caagtatggcacaggcrataaaactgtctgcag

SEQ ID NO: 4447 - DNA, 33 bp, Homo sapiens
cacaagacctttcacaygttatttcatttcatc

SEQ ID NO: 4448 - DNA, 33 bp, Homo sapiens
cacacacagagtacccyggcaaaatctggtgga

SEQ ID NO: 4449 - DNA, 33 bp, Homo sapiens
cacacatttttgaagtyaagtctttgttctttc

SEQ ID NO: 4450 - DNA, 33 bp, Homo sapiens
caccagccaggtgagaragaagatcggtgacaa

SEQ ID NO: 4451 - DNA, 33 bp, Homo sapiens
cactacaaaaagtacaytccacaatgagtaaga

SEQ ID NO: 4452 - DNA, 33 bp, Homo sapiens
cactgccttagaacatragtgcttccatacaga

SEQ ID NO: 4453 - DNA, 33 bp, Homo sapiens
cactgggaagttgctcyccttaagtctcagttt

SEQ ID NO: 4454 - DNA, 33 bp, Homo sapiens
cactttaatcttgtgakactaagactaagctgt

SEQ ID NO: 4455 - DNA, 33 bp, Homo sapiens
cactttgcataagagasattcctctggtatgtt

SEQ ID NO: 4456 - DNA, 33 bp, Homo sapiens
cagagtggatccgaacrctttacagaaattgga

SEQ ID NO: 4457 - DNA, 33 bp, Homo sapiens
cagagtgttaaagtaastggcctaaggtgtaca

SEQ ID NO: 4458 - DNA, 33 bp, Homo sapiens
caggaagatgtgaagckctttacactgcaggat

SEQ ID NO: 4459 - DNA, 33 bp, Homo sapiens
caggggtatcagcgacygggatgcgaaggtagg

SEQ ID NO: 4460 - DNA, 33 bp, Homo sapiens
cagtagactgagtgaaraagagctgctcttagt

SEQ ID NO: 4461 - DNA, 33 bp, Homo sapiens
cagttctctagctgtayggttctgaatcatttg

SEQ ID NO: 4462 - DNA, 33 bp, Homo sapiens
cagtttatgtccttcartctaacttttctgcta

SEQ ID NO: 4463 - DNA, 33 bp, Homo sapiens
cataagatgtcaatcartacatacaagacatac

SEQ ID NO: 4464 - DNA, 33 bp, Homo sapiens
catattccagggctacrctgttttacaaaatca

SEQ ID NO: 4465 - DNA, 33 bp, Homo sapiens
catcaccatgcattccrcacgaacctgtgttaa

SEQ ID NO: 4466 - DNA, 33 bp, Homo sapiens
catcattaatgtgaackcgagcaaataaaagaa

SEQ ID NO: 4467 - DNA, 33 bp, Homo sapiens
catcttgtggagcacakaatcactttttccttg

SEQ ID NO: 4468 - DNA, 33 bp, Homo sapiens
catgcaaacctgcctakgagagcgtccattgac

SEQ ID NO: 4469 - DNA, 33 bp, Homo sapiens
catggaggagaaaacayggaatagatcacacag

SEQ ID NO: 4470 - DNA, 33 bp, Homo sapiens
catggtgaatgtcagayaagtgtgaaataaact

SEQ ID NO: 4471 - DNA, 33 bp, Homo sapiens
catgttaaagtacccaraatccatccaactgaa

SEQ ID NO: 4472 - DNA, 33 bp, Homo sapiens
cattaattcaaaacaayacttgacatcctagtc

SEQ ID NO: 4473 - DNA, 33 bp, Homo sapiens
catttataaatccaccmagcaaacatatgaggc

SEQ ID NO: 4474 - DNA, 33 bp, Homo sapiens
ccaaagttctaatgaawtccaaagcatcatagt

SEQ ID NO: 4475 - DNA, 33 bp, Homo sapiens
ccaaatattgccgtcawaattagctaaaagaat

SEQ ID NO: 4476 - DNA, 33 bp, Homo sapiens
ccacatctcctaaatcrcgatcctgggccagta

SEQ ID NO: 4477 - DNA, 33 bp, Homo sapiens
ccactcaagaatgctgracaatcgttaacacta

SEQ ID NO: 4478 - DNA, 33 bp, Homo sapiens
ccactggcttgtttcasggataaaactctgttt

SEQ ID NO: 4479 - DNA, 33 bp, Homo sapiens
ccagatggaaactgacygagaatagtttggcag

SEQ ID NO: 4480 - DNA, 33 bp, Homo sapiens
ccaggctttcatagacwcaatcatataacagct

SEQ ID NO: 4481 - DNA, 33 bp, Homo sapiens
ccaggtcattcactgcyaagatggaaataaagt

SEQ ID NO: 4482 - DNA, 33 bp, Homo sapiens
ccagtaccttattcaasccaaatgaaggtttat

SEQ ID NO: 4483 - DNA, 33 bp, Homo sapiens
ccagttattcccctgayggtaagccctatatac

SEQ ID NO: 4484 - DNA, 33 bp, Homo sapiens
ccatgtttttgccacartattgtaacctgagat

SEQ ID NO: 4485 - DNA, 33 bp, Homo sapiens
ccattcgggcacttggmagagtttacagtgcag

SEQ ID NO: 4486 - DNA, 33 bp, Homo sapiens
ccatttagcttctagcratagttttctagagtc

SEQ ID NO: 4487 - DNA, 33 bp, Homo sapiens
cccaaacaactcctggmaattcttcttgctttc

SEQ ID NO: 4488 - DNA, 33 bp, Homo sapiens
cccacaaactgagagaratgtgtagaaacaggc

SEQ ID NO: 4489 - DNA, 33 bp, Homo sapiens
cccacagggggtggaasgacaagcaagtaacca

SEQ ID NO: 4490 - DNA, 33 bp, Homo sapiens
cccagggcagttgtggrataattagtaatagca

SEQ ID NO: 4491 - DNA, 33 bp, Homo sapiens
cccatcctttaaacagraacagtttgtgaagat

SEQ ID NO: 4492 - DNA, 33 bp, Homo sapiens
cccatggtgttagccasggctcaagaatgaagc

SEQ ID NO: 4493 - DNA, 33 bp, Homo sapiens
ccccacacacctagccrctatgcaatgactcag

SEQ ID NO: 4494 - DNA, 33 bp, Homo sapiens
ccctaaaactatcacayagctggttccttctga

SEQ ID NO: 4495 - DNA, 33 bp, Homo sapiens
ccctaaactgctaaaaraattgctgattctgtg

SEQ ID NO: 4496 - DNA, 33 bp, Homo sapiens
ccctggaatctggaackaagatcaagccttttg

SEQ ID NO: 4497 - DNA, 33 bp, Homo sapiens
cccttgactgtcatacmctgtggtcatatgaac

SEQ ID NO: 4498 - DNA, 33 bp, Homo sapiens
ccggaagcactatttakatacactatgccacca

SEQ ID NO: 4499 - DNA, 33 bp, Homo sapiens
ccgttttctgcatctcwattgtatccacgaaat

SEQ ID NO: 4500 - DNA, 33 bp, Homo sapiens
cctattaaggagactcrgaaatagctctcattc

SEQ ID NO: 4501 - DNA, 33 bp, Homo sapiens
tttctctttgatttcaygtgtatatcatttcct

SEQ ID NO: 4502 - DNA, 33 bp, Homo sapiens
cctcatctgcctctcakgaaagtggatttttga

SEQ ID NO: 4503 - DNA, 33 bp, Homo sapiens
cctcttggaaaaactgraagtagatccttgatg

SEQ ID NO: 4504 - DNA, 33 bp, Homo sapiens
cctgcgtttcttgggcyctgccaaactgtactg

SEQ ID NO: 4505 - DNA, 33 bp, Homo sapiens
cctggagcctggcatgmagttaacatacaagaa

SEQ ID NO: 4506 - DNA, 33 bp, Homo sapiens
cctggggacccttcaaycaaaccattttcaatt

SEQ ID NO: 4507 - DNA, 33 bp, Homo sapiens
cctggtgacaaactcarcacttatgatagtatt

SEQ ID NO: 4508 - DNA, 33 bp, Homo sapiens
cctgtgaagttgctgaygcgactcaatttaatg

SEQ ID NO: 4509 - DNA, 33 bp, Homo sapiens
cctgttttcagatgggragaccaggacttggag

SEQ ID NO: 4510 - DNA, 33 bp, Homo sapiens
cctttatcttccctttsaaaatctaagcctatc

SEQ ID NO: 4511 - DNA, 33 bp, Homo sapiens
cctttgtagatgttgaygaaaacaatctgttac

SEQ ID NO: 4512 - DNA, 33 bp, Homo sapiens
ccttttcctggtaacartcctcacaacaaatct

SEQ ID NO: 4513 - DNA, 33 bp, Homo sapiens
cgatttagtgagtatcmatctggtatccatttc

SEQ ID NO: 4514 - DNA, 33 bp, Homo sapiens
cgctttgagagggaaaygcagataggcgatcat

SEQ ID NO: 4515 - DNA, 33 bp, Homo sapiens
cggcaatagcttgcaastgataataaaggaagg

SEQ ID NO: 4516 - DNA, 33 bp, Homo sapiens
cgtcatatggcttcaartgagtagtgactagtg

SEQ ID NO: 4517 - DNA, 33 bp, Homo sapiens
cgttcctagaagagacrgagagcgctgactgaa

SEQ ID NO: 4518 - DNA, 33 bp, Homo sapiens
cgttgcagaggtctagraaggctggtttgaaga

SEQ ID NO: 4519 - DNA, 33 bp, Homo sapiens
ctaatgtaaacatgtcwcttgctctctcaatat

SEQ ID NO: 4520 - DNA, 33 bp, Homo sapiens
ctagaagtattttgcaycatccaaccttcattc

SEQ ID NO: 4521 - DNA, 33 bp, Homo sapiens
ctaggaactatccattraaattttcctgttaag

SEQ ID NO: 4522 - DNA, 33 bp, Homo sapiens
ctaggtattcatcatcrgaatggagttggattg

SEQ ID NO: 4523 - DNA, 33 bp, Homo sapiens
ctatagtttccttatayccaatggcttgtcgct

SEQ ID NO: 4524 - DNA, 33 bp, Homo sapiens
ctatcatcatcctgcaycacagttgtatttctg

SEQ ID NO: 4525 - DNA, 33 bp, Homo sapiens
ctatgaaccaggaagawgatgaaaatgtgctag

SEQ ID NO: 4526 - DNA, 33 bp, Homo sapiens
ctcaaaacactgattcygaaactctaataaaag

SEQ ID NO: 4527 - DNA, 33 bp, Homo sapiens
ctcaagctgaaatcackatcccatccttcagag

SEQ ID NO: 4528 - DNA, 33 bp, Homo sapiens
ctcacatcacacactaraagagtcatttccaaa

SEQ ID NO: 4529 - DNA, 33 bp, Homo sapiens
ctcagcaaacataactyacattccattcatgga

SEQ ID NO: 4530 - DNA, 33 bp, Homo sapiens
ctcagtctgcaaaaacsctgatgcgcaggtgac

SEQ ID NO: 4531 - DNA, 33 bp, Homo sapiens
ctccagccattgccaarctgcagtcctattatt

SEQ ID NO: 4532 - DNA, 33 bp, Homo sapiens
ctcctttaacgttttayacttccaggtgtcaac

SEQ ID NO: 4533 - DNA, 33 bp, Homo sapiens
ctctaaggtttagtcastcttgggggcacacct

SEQ ID NO: 4534 - DNA, 33 bp, Homo sapiens
ctctggactctggcagratggtagagaagatgc

SEQ ID NO: 4535 - DNA, 33 bp, Homo sapiens
ctctgtcctggaataaycctgcaattaggaagt

SEQ ID NO: 4536 - DNA, 33 bp, Homo sapiens
ctcttttcttcacaaaytcctcagtctcatgta

SEQ ID NO: 4537 - DNA, 33 bp, Homo sapiens
ctgatccgctttcccaraccagttatttgttgt

SEQ ID NO: 4538 - DNA, 33 bp, Homo sapiens
ctgcatgataatagtayggtgtcaaggttaaat

SEQ ID NO: 4539 - DNA, 33 bp, Homo sapiens
ctgccttagtaggtaaytgaaacattgtagcag

SEQ ID NO: 4540 - DNA, 33 bp, Homo sapiens
ctgccttgacattctaygactttaaaatcaaag

SEQ ID NO: 4541 - DNA, 33 bp, Homo sapiens
ctgctctcactgattcratatcttaggtctgtt

SEQ ID NO: 4542 - DNA, 33 bp, Homo sapiens
ctggaaggacgagatgragatacatttgggtat

SEQ ID NO: 4543 - DNA, 33 bp, Homo sapiens
ctgtagctcttgaggcratgaaacagcgctgag

SEQ ID NO: 4544 - DNA, 33 bp, Homo sapiens
ctgtttacttgctccartctggccacactggcc

SEQ ID NO: 4545 - DNA, 33 bp, Homo sapiens
ctgtttctttgcccaayaatacacatcatcatg

SEQ ID NO: 4546 - DNA, 33 bp, Homo sapiens
cttatgagaagcaacarctaggaaaggtgaggg

SEQ ID NO: 4547 - DNA, 33 bp, Homo sapiens
cttatgtacaaatcaarcagttcaatttgcttg

SEQ ID NO: 4548 - DNA, 33 bp, Homo sapiens
cttctcactgaacattmaaatgaggcccaggga

SEQ ID NO: 4549 - DNA, 33 bp, Homo sapiens
cttgttgacattagtaygtgaggacaagtcctg

SEQ ID NO: 4550 - DNA, 33 bp, Homo sapiens
ctttagacacaaaatgycaggcaaaaaataaaa

SEQ ID NO: 4551 - DNA, 33 bp, Homo sapiens
ctttgagagcatgaagsagggtcttctaaccta

SEQ ID NO: 4552 - DNA, 33 bp, Homo sapiens
ctttgcaaattaaatayctgctgaagttgctct

SEQ ID NO: 4553 - DNA, 33 bp, Homo sapiens
ctttgccatccgcagayagcttaaagttaacca

SEQ ID NO: 4554 - DNA, 33 bp, Homo sapiens
cttttctgatgaagggscacttccaagaggagg

SEQ ID NO: 4555 - DNA, 33 bp, Homo sapiens
ctttttgtactattgamtatgattgactcccat

SEQ ID NO: 4556 - DNA, 33 bp, Homo sapiens
gaaaaacaaatcttgcmacgtagacggtggctc

SEQ ID NO: 4557 - DNA, 33 bp, Homo sapiens
gaaaacaatatagacartcaaagggtcaaaaaa

SEQ ID NO: 4558 - DNA, 33 bp, Homo sapiens
gaaacataagctcttayaggtctaaagcctgcc

SEQ ID NO: 4559 - DNA, 33 bp, Homo sapiens
gaaatgtcgctatggtsaactctgagatgtgat

SEQ ID NO: 4560 - DNA, 33 bp, Homo sapiens
gaaattccatcaagaarctggctctgagctctc

SEQ ID NO: 4561 - DNA, 33 bp, Homo sapiens
gaagaatatctagcagyatagtaaaagtgaaag

SEQ ID NO: 4562 - DNA, 33 bp, Homo sapiens
gaagtgtgtctctctamattttttgtcacctac

SEQ ID NO: 4563 - DNA, 33 bp, Homo sapiens
gaagtttacatagaaakgaaccttcacacagct

SEQ ID NO: 4564 - DNA, 33 bp, Homo sapiens
gaataaaagtatatcaygggagttacctctgtc

SEQ ID NO: 4565 - DNA, 33 bp, Homo sapiens
gaatctccaatctaccycacaagtgcttacacc

SEQ ID NO: 4566 - DNA, 33 bp, Homo sapiens
gaatgcctatcgatgaygtgagtgttgaatagg

SEQ ID NO: 4567 - DNA, 33 bp, Homo sapiens
gacaatcagaaggatcraatgttgtttttaaag

SEQ ID NO: 4568 - DNA, 33 bp, Homo sapiens
gaccatcacacagacaytgacttaatattctcc

SEQ ID NO: 4569 - DNA, 33 bp, Homo sapiens
gacctgagagtaatgaygtagtgtatctgctgg

SEQ ID NO: 4570 - DNA, 33 bp, Homo sapiens
gactaggcaatttacaygagaaagaggttcaat

SEQ ID NO: 4571 - DNA, 33 bp, Homo sapiens
gactcattaagaaggaytagactagttgggaag

SEQ ID NO: 4572 - DNA, 33 bp, Homo sapiens
cagaatttaatacttaygctggctacagtaggg

SEQ ID NO: 4573 - DNA, 33 bp, Homo sapiens
aagtaaacaaacgtccygccagctgtggccgag

SEQ ID NO: 4574 - DNA, 33 bp, Homo sapiens
gactgactcaacccccsagaccaacaggctgac

SEQ ID NO: 4575 - DNA, 33 bp, Homo sapiens
gacttgcatctaaagtraagctttgctcctgag

SEQ ID NO: 4576 - DNA, 33 bp, Homo sapiens
gactttcatcaggacayagagtggcagtcatgt

SEQ ID NO: 4577 - DNA, 33 bp, Homo sapiens
gagaactgcagctgtamgagaggattgcccatg

SEQ ID NO: 4578 - DNA, 33 bp, Homo sapiens
aaaaccaatggagttaygctatacttatttcta

SEQ ID NO: 4579 - DNA, 33 bp, Homo sapiens
gagagaatcctgtcagyacaagcctggcgtcgt

SEQ ID NO: 4580 - DNA, 33 bp, Homo sapiens
gagagagagctaaaacrcatccttcatccacct

SEQ ID NO: 4581 - DNA, 33 bp, Homo sapiens
gagatataattcatacycacctgaagtgtacat

SEQ ID NO: 4582 - DNA, 33 bp, Homo sapiens
gaggactaaacaaggtracacttacacaggtac

SEQ ID NO: 4583 - DNA, 33 bp, Homo sapiens
gaggcctctgctgtgaytcaactatgtgggcct

SEQ ID NO: 4584 - DNA, 33 bp, Homo sapiens
gaggccttcaaccctartaactgctttatcatc

SEQ ID NO: 4585 - DNA, 33 bp, Homo sapiens
gagggaaaattcaagaygtctggattttagagg

SEQ ID NO: 4586 - DNA, 33 bp, Homo sapiens
gagggacacagtggaaragacctgttcagtatc

SEQ ID NO: 4587 - DNA, 33 bp, Homo sapiens
gagggtagatgggagaygaaccaatgaaatagt

SEQ ID NO: 4588 - DNA, 33 bp, Homo sapiens
gaggtgagcatagagtyaagggggttgggatac

SEQ ID NO: 4589 - DNA, 33 bp, Homo sapiens
gagttctactgtggaayattcatcttcatgagg

SEQ ID NO: 4590 - DNA, 33 bp, Homo sapiens
gataagacatgaaacarattcctaattaagtta

SEQ ID NO: 4591 - DNA, 33 bp, Homo sapiens
gatataaaaatgcccartcctaacacactactg

SEQ ID NO: 4592 - DNA, 33 bp, Homo sapiens
gatcacatcagagttgwaaatatatgcctcagt

SEQ ID NO: 4593 - DNA, 33 bp, Homo sapiens
gatctacttggctccamattccacactgtcttc

SEQ ID NO: 4594 - DNA, 33 bp, Homo sapiens
gattacagctacattcmataaacacttttaaaa

SEQ ID NO: 4595 - DNA, 33 bp, Homo sapiens
gattcaatctgctctcyactgacgtgttctgtt

SEQ ID NO: 4596 - DNA, 33 bp, Homo sapiens
gcaaatacctctatggwcactaagtggctgcgc

SEQ ID NO: 4597 - DNA, 33 bp, Homo sapiens
gcaaatagcatccaggraactggcaagatcagg

SEQ ID NO: 4598 - DNA, 33 bp, Homo sapiens
gcaatatcatgtataayatcatggcttgtctca

SEQ ID NO: 4599 - DNA, 33 bp, Homo sapiens
gcaatcaattctgcagyagttatcagcacgttg

SEQ ID NO: 4600 - DNA, 33 bp, Homo sapiens
gcaatctattggctatmagaccttaaaacttat

SEQ ID NO: 4601 - DNA, 33 bp, Homo sapiens
gcaattcaaacctttcmaatgtgagataatgca

SEQ ID NO: 4602 - DNA, 33 bp, Homo sapiens
gcagaaaggcttctccraccaggcagatgtatg

SEQ ID NO: 4603 - DNA, 33 bp, Homo sapiens
gcagagatagcagaaakcaagaaaaaggttgga

SEQ ID NO: 4604 - DNA, 33 bp, Homo sapiens
gcagcatgtaaaagacyactggactggcagttg

SEQ ID NO: 4605 - DNA, 33 bp, Homo sapiens
gcataaaaaaatcaaasagacggcaggccttgg

SEQ ID NO: 4606 - DNA, 33 bp, Homo sapiens
gcatcaaacaggcaaayggaagaaccatgaagg

SEQ ID NO: 4607 - DNA, 33 bp, Homo sapiens
gcatccttccgtgcggycaagttggagaacaga

SEQ ID NO: 4608 - DNA, 33 bp, Homo sapiens
gccacttagacccacasagagatgttaccggcc

SEQ ID NO: 4609 - DNA, 33 bp, Homo sapiens
gccagacattgtaaagrccagctgatcattggt

SEQ ID NO: 4610 - DNA, 33 bp, Homo sapiens
gccccatcagcagaaaytagccctggagtctcc

SEQ ID NO: 4611 - DNA, 33 bp, Homo sapiens
gccctttttggaacaamcttcttgaggatagag

SEQ ID NO: 4612 - DNA, 33 bp, Homo sapiens
gccgtggcaactcaacracaaagtgctggctcg

SEQ ID NO: 4613 - DNA, 33 bp, Homo sapiens
gcctacagacaggacamcttcaaaaaggaaaga

SEQ ID NO: 4614 - DNA, 33 bp, Homo sapiens
gcctcaagtcctgggawgcacttactattatta

SEQ ID NO: 4615 - DNA, 33 bp, Homo sapiens
gctaaacatcctataaygtgtaggacaaccccc

SEQ ID NO: 4616 - DNA, 33 bp, Homo sapiens
gctacctctagggtcasagaagtggatgagaga

SEQ ID NO: 4617 - DNA, 33 bp, Homo sapiens
gctcagactctgaacarcgatgaattctaaaag

SEQ ID NO: 4618 - DNA, 33 bp, Homo sapiens
gctccagggaccctaaygatcagactctttcac

SEQ ID NO: 4619 - DNA, 33 bp, Homo sapiens
gcttcaagcacttgagrcacttggaaatcctac

SEQ ID NO: 4620 - DNA, 33 bp, Homo sapiens
gctttcaagacaaacaygagagagagagcccaa

SEQ ID NO: 4621 - DNA, 33 bp, Homo sapiens
ggaaaaaactcttgtargatatgtttggtggtt

SEQ ID NO: 4622 - DNA, 33 bp, Homo sapiens
ggaaaaatttggtaaartctgcaaataggaaga

SEQ ID NO: 4623 - DNA, 33 bp, Homo sapiens
ggaaaaggtggttttcragaatttctagagcat

SEQ ID NO: 4624 - DNA, 33 bp, Homo sapiens
ggaatccttcagatacyaaaccgaggaaagaac

SEQ ID NO: 4625 - DNA, 33 bp, Homo sapiens
ggaatgaaataatggayggtatttgcagcaacc

SEQ ID NO: 4626 - DNA, 33 bp, Homo sapiens
ggagctcggactataayggagcaatggggaaca

SEQ ID NO: 4627 - DNA, 33 bp, Homo sapiens
ggaggggcttgagtaargcatgacccaaaggtc

SEQ ID NO: 4628 - DNA, 33 bp, Homo sapiens
ggagtccagtcgttagyaggagttctggaggag

SEQ ID NO: 4629 - DNA, 33 bp, Homo sapiens
gtagaaacaatgtaaamaatctctctgtgaaga

SEQ ID NO: 4630 - DNA, 33 bp, Homo sapiens
gtatccttcaaattcaractactaacaatctgc

SEQ ID NO: 4631 - DNA, 33 bp, Homo sapiens
gtcattggtttctgtgracctcagtttctattc

SEQ ID NO: 4632 - DNA, 33 bp, Homo sapiens
aacttcaactaaattgyactggactatctggat

SEQ ID NO: 4633 - DNA, 33 bp, Homo sapiens
tcatctcatggctgcasgaagtcagtgtctaac

SEQ ID NO: 4634 - DNA, 33 bp, Homo sapiens
tgacctttccacagcastaatgttgctgactct

SEQ ID NO: 4635 - DNA, 33 bp, Homo sapiens
tgtacgcatttaataaygtactatttgcttcta

SEQ ID NO: 4636 - DNA, 33 bp, Homo sapiens
ttgagactgcaattacyagaaaacactgctata

SEQ ID NO: 4637 - DNA, 33 bp, Homo sapiens
tttcagattagaagaaygtttcaaaccatttct

SEQ ID NO: 4638 - DNA, 33 bp, Homo sapiens
tttgcatatccctaatsatgagtggtattgagc

SEQ ID NO: 4639 - DNA, 33 bp, Homo sapiens
ttttccacacctggaarctctacattggtattt

SEQ ID NO: 4640 - DNA, 33 bp, Homo sapiens
agaactgaaatgacaakgctcacctatccccac

SEQ ID NO: 4641 - DNA, 33 bp, Homo sapiens
ccatggaattaactgaygtcccttcagtgttct

SEQ ID NO: 4642 - DNA, 33 bp, Homo sapiens
caaaggcttctgttcawagggaagctttgctgg

SEQ ID NO: 4643 - DNA, 33 bp, Homo sapiens
gttaatattaaactgayccgtctctttttgcct

SEQ ID NO: 4644 - DNA, 33 bp, Homo sapiens
ctttccttatctctaakttaaacatctctattt

SEQ ID NO: 4645 - DNA, 33 bp, Homo sapiens
ctagatacctctcaaayctttgtgcttgtccaa

SEQ ID NO: 4646 - DNA, 33 bp, Homo sapiens
ggattcagcagacctakgttctagttcaggctt

SEQ ID NO: 4647 - DNA, 33 bp, Homo sapiens
aagacaccttataaccraggacttaaagtgaga

SEQ ID NO: 4648 - DNA, 33 bp, Homo sapiens
tggttgtttaacacaaygtggtgaccttcggca

SEQ ID NO: 4649 - DNA, 33 bp, Homo sapiens
aatgggttacaagcaayaatggatcacctccaa

SEQ ID NO: 4650 - DNA, 33 bp, Homo sapiens
aaaatagggataataayagcactctcagagttg

SEQ ID NO: 4651 - DNA, 33 bp, Homo sapiens
aaacccatggtagggckcggcttaaaaagagtc

SEQ ID NO: 4652 - DNA, 33 bp, Homo sapiens
aacaaataaaggtctcyacgtacagatttggag

SEQ ID NO: 4653 - DNA, 33 bp, Homo sapiens
aatttgcctgtcttcakataatactgatacttt

SEQ ID NO: 4654 - DNA, 33 bp, Homo sapiens
acagctgcctactggawacatatacttgcattt

SEQ ID NO: 4655 - DNA, 33 bp, Homo sapiens
agaacagacaactcackatctttgagtctattt

SEQ ID NO: 4656 - DNA, 33 bp, Homo sapiens
agtacatttgccaggcrgatagttacataatat

SEQ ID NO: 4657 - DNA, 33 bp, Homo sapiens
atagcatcagtcttaargctctaatataaacaa

SEQ ID NO: 4658 - DNA, 33 bp, Homo sapiens
atcatgctagggtcacrcaatgtcatcttctgc

SEQ ID NO: 4659 - DNA, 33 bp, Homo sapiens
atccacggatatagaamccatgaatgtggaggg

SEQ ID NO: 4660 - DNA, 33 bp, Homo sapiens
atcccccaccagagtcrcacatttgttcattat

SEQ ID NO: 4661 - DNA, 33 bp, Homo sapiens
atgtaactcttatagamctctccctcaaatctc

SEQ ID NO: 4662 - DNA, 33 bp, Homo sapiens
atttagtttcaccacaytgaggcacaacttaga

SEQ ID NO: 4663 - DNA, 33 bp, Homo sapiens
cactggcctggggtagkagctaaagccatatgc

SEQ ID NO: 4664 - DNA, 33 bp, Homo sapiens
ccaatgaacagaaaccrggggcaacgtatgttt

SEQ ID NO: 4665 - DNA, 33 bp, Homo sapiens
ccccaggactgctctaygggctgctctgagtat

SEQ ID NO: 4666 - DNA, 33 bp, Homo sapiens
ctcagttgaaattcagyaatccctgtgtcgcct

SEQ ID NO: 4667 - DNA, 33 bp, Homo sapiens
ctgagaatatttgccaygatgttgcagagttta

SEQ ID NO: 4668 - DNA, 33 bp, Homo sapiens
ctggcagagcctaatamagtgtaaaacagtaaa

SEQ ID NO: 4669 - DNA, 33 bp, Homo sapiens
gaaagtaaaggtagaawcccctgataaactgat

SEQ ID NO: 4670 - DNA, 33 bp, Homo sapiens
gaaagtgccaggggaastgcaacttggcaatgg

SEQ ID NO: 4671 - DNA, 33 bp, Homo sapiens
gagagagaaagtggaargaaacaaaatgaacag

SEQ ID NO: 4672 - DNA, 33 bp, Homo sapiens
gatcctggagctcagaygtaaggtgtgctagag

SEQ ID NO: 4673 - DNA, 33 bp, Homo sapiens
gcaataaagagaattargcaggctggcttctgg

SEQ ID NO: 4674 - DNA, 33 bp, Homo sapiens
gcaggaaggttcaggcrgactcatagtgtgggg

SEQ ID NO: 4675 - DNA, 33 bp, Homo sapiens
gccgtaagtcaagtcargtacccaggtggttaa

SEQ ID NO: 4676 - DNA, 33 bp, Homo sapiens
gctactgcgctcaatarcacttattatttatcc

SEQ ID NO: 4677 - DNA, 33 bp, Homo sapiens
gcttcactatgtgacaytattaaaattttcata

SEQ ID NO: 4678 - DNA, 33 bp, Homo sapiens
gcttcctgaacaagcarggacactgtcaaacac

SEQ ID NO: 4679 - DNA, 33 bp, Homo sapiens
ggaattaagaccccagyaactagtgaaattgtg

SEQ ID NO: 4680 - DNA, 33 bp, Homo sapiens
ggagaagagcagttgtraatgggaggttggcaa

SEQ ID NO: 4681 - DNA, 33 bp, Homo sapiens
ggagccctagaaggtarcaacaatcctcttaaa

SEQ ID NO: 4682 - DNA, 33 bp, Homo sapiens
ggcatgtggtagaagayggagaattcaatattg

SEQ ID NO: 4683 - DNA, 33 bp, Homo sapiens
ggcccaaaagaatccayatttagagctaaaaag

SEQ ID NO: 4684 - DNA, 33 bp, Homo sapiens
ggtatatattcaaaagraaacaattgttctacc

SEQ ID NO: 4685 - DNA, 33 bp, Homo sapiens
gtcctgtggctggaacmctgaagatgtgagctt

SEQ ID NO: 4686 - DNA, 33 bp, Homo sapiens
gtctatgagaacaaaargaaaggaacaactttt

SEQ ID NO: 4687 - DNA, 33 bp, Homo sapiens
gtcttcccattgcaaawgccttaatcacaggca

SEQ ID NO: 4688 - DNA, 33 bp, Homo sapiens
gtgctcctataagcacyggaatctggataaaaa

SEQ ID NO: 4689 - DNA, 33 bp, Homo sapiens
gtgtgagtgggttgcaygttcaagatcacaggc

SEQ ID NO: 4690 - DNA, 33 bp, Homo sapiens
gttattgaaacctaccrccacagatattcccat

SEQ ID NO: 4691 - DNA, 33 bp, Homo sapiens
taaaaaaatgtaatgcraggtcagataaccccg

SEQ ID NO: 4692 - DNA, 33 bp, Homo sapiens
tggattgcacaaagaakatgtatttaaggctct

SEQ ID NO: 4693 - DNA, 33 bp, Homo sapiens
tacgaaattgtaatgaytaagtgcatatttttg

SEQ ID NO: 4694 - DNA, 33 bp, Homo sapiens
tactatttacaacaccyggcttagtagggatca

SEQ ID NO: 4695 - DNA, 33 bp, Homo sapiens
tcaccattattggaaaygtaggtagtgcccaaa

SEQ ID NO: 4696 - DNA, 33 bp, Homo sapiens
tcactttcctgatggaytcatgggacttttctg

SEQ ID NO: 4697 - DNA, 33 bp, Homo sapiens
tcagctcaggctgttaygacaaaaataccacag

SEQ ID NO: 4698 - DNA, 33 bp, Homo sapiens
tcattacagcagctaaygtaggctaagcccaca

SEQ ID NO: 4699 - DNA, 33 bp, Homo sapiens
tccttacatgagaaacygagagatagtatatat

SEQ ID NO: 4700 - DNA, 33 bp, Homo sapiens
tggggtatagtgtactwaacactgaagcctaat

SEQ ID NO: 4701 - DNA, 33 bp, Homo sapiens
tcttacaggcaaagcarcttgtataatggggaa

SEQ ID NO: 4702 - DNA, 33 bp, Homo sapiens
tgagtattacatgttasattcttggatgctttc

SEQ ID NO: 4703 - DNA, 33 bp, Homo sapiens
tgctggacccctgctaygcctcagcacggatgt

SEQ ID NO: 4704 - DNA, 33 bp, Homo sapiens
tggaaatccacatcccrgagacatctaattctt

SEQ ID NO: 4705 - DNA, 33 bp, Homo sapiens
tggatcaataacacatmatagattcaaatactt

SEQ ID NO: 4706 - DNA, 33 bp, Homo sapiens
tgtccaagttgataagyagatatagctttcaca

SEQ ID NO: 4707 - DNA, 33 bp, Homo sapiens
tgtgatgagctcggtargcccggcgcctcgccg

SEQ ID NO: 4708 - DNA, 33 bp, Homo sapiens
tgtgtagctgaagcaayatgaagcaaaaagaac

SEQ ID NO: 4709 - DNA, 33 bp, Homo sapiens
ttccaatactaggcaarccacaaagcaggatct

SEQ ID NO: 4710 - DNA, 33 bp, Homo sapiens
ttgtagctaggatcccrgatgtctgcagtgcaa

SEQ ID NO: 4711 - DNA, 33 bp, Homo sapiens
ttttttatagtggctayattagagttagttttc

SEQ ID NO: 4712 - DNA, 33 bp, Homo sapiens
tttaaaacatgtcaagyagtagaaagtagggtg

SEQ ID NO: 4713 - DNA, 33 bp, Homo sapiens
tgaagatatgagcttayagtctaatgggaaaaa

SEQ ID NO: 4714 - DNA, 33 bp, Homo sapiens
gtagttgtcactgtgarctaggcaagcctttct

SEQ ID NO: 4715 - DNA, 33 bp, Homo sapiens
aacctctaaacagcatraaagggatcagctcac

SEQ ID NO: 4716 - DNA, 33 bp, Homo sapiens
gtttagtattgccatawcctctcagtgagagaa

SEQ ID NO: 4717 - DNA, 33 bp, Homo sapiens
ttaaccaagtgaggcaygttgttctgatctcag

SEQ ID NO: 4718 - DNA, 33 bp, Homo sapiens
gaggaggaagacctgayacaatgaatgaacagt

SEQ ID NO: 4719 - DNA, 33 bp, Homo sapiens
ccaccttgtatgagagragctacttaggtgttt

SEQ ID NO: 4720 - DNA, 33 bp, Homo sapiens
gtgcaacagattttcaraagttttcattttgca

SEQ ID NO: 4721 - DNA, 33 bp, Homo sapiens
aaagtagcaattgaaaygatgagaagctaaagg

SEQ ID NO: 4722 - DNA, 33 bp, Homo sapiens
tggatctcactctatcrctgttatatgttacgt

SEQ ID NO: 4723 - DNA, 33 bp, Homo sapiens
caggatttaactcgccyatgatatagaacacaa

SEQ ID NO: 4724 - DNA, 33 bp, Homo sapiens
ggcagaattctttcccsctttgccagaggaaaa

SEQ ID NO: 4725 - DNA, 33 bp, Homo sapiens
ctgttcctcagatataratgctagaggagatgg

SEQ ID NO: 4726 - DNA, 33 bp, Homo sapiens
taaggccatcttccccygacctctgtgtaaagg

SEQ ID NO: 4727 - DNA, 33 bp, Homo sapiens
cttctggcaggcaagamgttatgctacttataa

SEQ ID NO: 4728 - DNA, 33 bp, Homo sapiens
tccctcttcaataaacycttatctgcaaagcct

SEQ ID NO: 4729 - DNA, 33 bp, Homo sapiens
aaaacaatttttaagayattggctattagtcaa

SEQ ID NO: 4730 - DNA, 33 bp, Homo sapiens
aacagagtaaaaagacwatctaaagaatgggaa

SEQ ID NO: 4731 - DNA, 33 bp, Homo sapiens
aacatgtcagatatgcygcagatggctgagata

SEQ ID NO: 4732 - DNA, 33 bp, Homo sapiens
aacctgattctaaataygtacagagggtaatgg

SEQ ID NO: 4733 - DNA, 33 bp, Homo sapiens
acatttgtaatttgaartcttggggaatagtga

SEQ ID NO: 4734 - DNA, 33 bp, Homo sapiens
accatcctacagatgasgagaaggcacagagag

SEQ ID NO: 4735 - DNA, 33 bp, Homo sapiens
accctaaggcaagtaaygtgacaaactggctta

SEQ ID NO: 4736 - DNA, 33 bp, Homo sapiens
acttaggcagttatcarggtttctgggattttt

SEQ ID NO: 4737 - DNA, 33 bp, Homo sapiens
agaaaaccagtgaacasgcatatgaattgttgt

SEQ ID NO: 4738 - DNA, 33 bp, Homo sapiens
agagaattgtttatgaycaggaatttgaggcca

SEQ ID NO: 4739 - DNA, 33 bp, Homo sapiens
agagtaaaatgactgtmaaattcaaggaaatat

SEQ ID NO: 4740 - DNA, 33 bp, Homo sapiens
agatctagcattcttgwagaccaatatgccatt

SEQ ID NO: 4741 - DNA, 33 bp, Homo sapiens
agcctattcttagagtraaattcttttccgtgc

SEQ ID NO: 4742 - DNA, 33 bp, Homo sapiens
agctgttctgtacttamgtcacacccagaattg

SEQ ID NO: 4743 - DNA, 33 bp, Homo sapiens
agcttagtgggagaatkacatccatttctgtct

SEQ ID NO: 4744 - DNA, 33 bp, Homo sapiens
agggaatttcatgcagyctcccttgtggatgat

SEQ ID NO: 4745 - DNA, 33 bp, Homo sapiens
agtaattaatgttgcamaacaaccattgcccca

SEQ ID NO: 4746 - DNA, 33 bp, Homo sapiens
agtgtcctgtatcaatkaagaacctgttgggga

SEQ ID NO: 4747 - DNA, 33 bp, Homo sapiens
atcaccagttttaaggratgagcagtagatgtg

SEQ ID NO: 4748 - DNA, 33 bp, Homo sapiens
atgagtctttcccacartgcctaaaaagattct

SEQ ID NO: 4749 - DNA, 33 bp, Homo sapiens
atggacagtcttacaaytctgggtgtgacttaa

SEQ ID NO: 4750 - DNA, 33 bp, Homo sapiens
attgcagattacataaytgggattaagtgaggt

SEQ ID NO: 4751 - DNA, 33 bp, Homo sapiens
cacataagactttcacraaggcagcttggatgt

SEQ ID NO: 4752 - DNA, 33 bp, Homo sapiens
cactgatttggttggcycttgaaggagtcagtt

SEQ ID NO: 4753 - DNA, 33 bp, Homo sapiens
cagctaatctgaagtgyactgagattcacccag

SEQ ID NO: 4754 - DNA, 33 bp, Homo sapiens
caattgatagagaaaawcacagagctctccaca

SEQ ID NO: 4755 - DNA, 33 bp, Homo sapiens
caggagggaacatggamctcattgcatccatgc

SEQ ID NO: 4756 - DNA, 33 bp, Homo sapiens
catccttcaggggtcaratgttaattgccaggg

SEQ ID NO: 4757 - DNA, 33 bp, Homo sapiens
catgtgtgatctttggrcaggactatacctgct

SEQ ID NO: 4758 - DNA, 33 bp, Homo sapiens
cctttgatatcaaggartcaaggacgtgatgtt

SEQ ID NO: 4759 - DNA, 33 bp, Homo sapiens
ctatatctgtatggaaytgtcacaattatggag

SEQ ID NO: 4760 - DNA, 33 bp, Homo sapiens
ctccccacaattttcamagaatacaatgcattg

SEQ ID NO: 4761 - DNA, 33 bp, Homo sapiens
ctgagtggtaatttccrattggatctcagacat

SEQ ID NO: 4762 - DNA, 33 bp, Homo sapiens
ctgcaactagcatcagyatggaaatggaccagc

SEQ ID NO: 4763 - DNA, 33 bp, Homo sapiens
gaaactgaggcacagtraactaattttcccaag

SEQ ID NO: 4764 - DNA, 33 bp, Homo sapiens
gaaattacacagttgtraagtggcaaacacaag

SEQ ID NO: 4765 - DNA, 33 bp, Homo sapiens
gaaggccttgaagtcgragcctgtttggtgagt

SEQ ID NO: 4766 - DNA, 33 bp, Homo sapiens
cagtttggattcaagcrcagcttttcttggttc

SEQ ID NO: 4767 - DNA, 33 bp, Homo sapiens
gatgacattattgtccyatatgctaaaactatt

SEQ ID NO: 4768 - DNA, 33 bp, Homo sapiens
gcaaccctactatctgmaggtatttttcacttc

SEQ ID NO: 4769 - DNA, 33 bp, Homo sapiens
gcacacgttcacggagrcctctcttggcaagct

SEQ ID NO: 4770 - DNA, 33 bp, Homo sapiens
gcagtggctacattccrgaaaacagccgcagaa

SEQ ID NO: 4771 - DNA, 33 bp, Homo sapiens
gccaagacagatggctkaaaaggtcacgctgct

SEQ ID NO: 4772 - DNA, 33 bp, Homo sapiens
gcctaacaacagagtayacatgagccaaaatct

SEQ ID NO: 4773 - DNA, 33 bp, Homo sapiens
gcctggatgttaaaaastgcatcctccctgagg

SEQ ID NO: 4774 - DNA, 33 bp, Homo sapiens
gcgtaaattccagtccraaaggtggcaggctca

SEQ ID NO: 4775 - DNA, 33 bp, Homo sapiens
ggaaagcaacgaaagcracggcagttggacttc

SEQ ID NO: 4776 - DNA, 33 bp, Homo sapiens
tgtgcaacttgatgatragaaggtggttttgag

SEQ ID NO: 4777 - DNA, 33 bp, Homo sapiens
gagcagtctgagccaarggttgagtagagagca

SEQ ID NO: 4778 - DNA, 33 bp, Homo sapiens
aagaaagtgtacattcyaattccctggactaaa

SEQ ID NO: 4779 - DNA, 33 bp, Homo sapiens
ggcagcagttattccaygttgaccactcttata

SEQ ID NO: 4780 - DNA, 33 bp, Homo sapiens
gggaatgatttctctaygcaaaacttattccat

SEQ ID NO: 4781 - DNA, 33 bp, Homo sapiens
gggacaaaggaagagaratgctgtcaaaatcat

SEQ ID NO: 4782 - DNA, 33 bp, Homo sapiens
gggacccagaggtcacrgaataccaatatgaat

SEQ ID NO: 4783 - DNA, 33 bp, Homo sapiens
gggatgatgacatcacrcaaatggtcatgaata

SEQ ID NO: 4784 - DNA, 33 bp, Homo sapiens
ggtttgaggaatggacyacttagcagggctaaa

SEQ ID NO: 4785 - DNA, 33 bp, Homo sapiens
gtagaaaaaacggaccraagtgcctgcctaagg

SEQ ID NO: 4786 - DNA, 33 bp, Homo sapiens
gtaggtaaattacaccyagataaattgcaaata

SEQ ID NO: 4787 - DNA, 33 bp, Homo sapiens
gtcacatggtcaccaakaattcagaggcggttg

SEQ ID NO: 4788 - DNA, 33 bp, Homo sapiens
gtcactggaaggtgtayataggcttttgccata

SEQ ID NO: 4789 - DNA, 33 bp, Homo sapiens
gtcataacctcctaaaytgattcacagcccact

SEQ ID NO: 4790 - DNA, 33 bp, Homo sapiens
gtcctgcggcatctacmgaactggatgtaagca

SEQ ID NO: 4791 - DNA, 33 bp, Homo sapiens
gtgtagagaaataggawgaaagaggatttcaac

SEQ ID NO: 4792 - DNA, 33 bp, Homo sapiens
gtgttgggatgaagtayaagcaaaaagcaggag

SEQ ID NO: 4793 - DNA, 33 bp, Homo sapiens
gttgagagcttgaaagracaaaaaggtagagga

SEQ ID NO: 4794 - DNA, 33 bp, Homo sapiens
taaacaactctgataaygtagcttactgtcatt

SEQ ID NO: 4795 - DNA, 33 bp, Homo sapiens
taaagtatcctgtggaycaaggctaaggctaag

SEQ ID NO: 4796 - DNA, 33 bp, Homo sapiens
taactcttgatgcactraaggcaaactaccgga

SEQ ID NO: 4797 - DNA, 33 bp, Homo sapiens
taatcatttgaaggaakaattcacaaggagagc

SEQ ID NO: 4798 - DNA, 33 bp, Homo sapiens
taggcccaatgtgagayaaactatgtcaggacc

SEQ ID NO: 4799 - DNA, 33 bp, Homo sapiens
tataaaggcttgcctargtaggccaggactgaa

SEQ ID NO: 4800 - DNA, 33 bp, Homo sapiens
tatctgagagccaaccrcgtgtcagtcactgag

SEQ ID NO: 4801 - DNA, 33 bp, Homo sapiens
tatggaggaaatcaatyacaagttatccataaa

SEQ ID NO: 4802 - DNA, 33 bp, Homo sapiens
tatttctctctttccartaccaccacatttcct

SEQ ID NO: 4803 - DNA, 33 bp, Homo sapiens
tcaatgccatggaataraatgagttgttggaaa

SEQ ID NO: 4804 - DNA, 33 bp, Homo sapiens
tcagagaacagaatgascagttcaggagttcag

SEQ ID NO: 4805 - DNA, 33 bp, Homo sapiens
tccaattagccttaacmctttcagtccttttct

SEQ ID NO: 4806 - DNA, 33 bp, Homo sapiens
tccctgatccattgaayctaaaagtctgagact

SEQ ID NO: 4807 - DNA, 33 bp, Homo sapiens
agaaaaatctagcaagratcaaaggttaagtac

SEQ ID NO: 4808 - DNA, 33 bp, Homo sapiens
tctccagttcctattayatttctgcctaatttt

SEQ ID NO: 4809 - DNA, 33 bp, Homo sapiens
tctgaaccacaaagcamaaaaatattctgagtg

SEQ ID NO: 4810 - DNA, 33 bp, Homo sapiens
tcttcctcttctctacrctttgagctccttgag

SEQ ID NO: 4811 - DNA, 33 bp, Homo sapiens
tgaaatactgttataayacctgcaagcttacaa

SEQ ID NO: 4812 - DNA, 33 bp, Homo sapiens
tgacacaggcaggtaasataaaatttacctttt

SEQ ID NO: 4813 - DNA, 33 bp, Homo sapiens
tgagagaactccaagarggatgtcgaaactggg

SEQ ID NO: 4814 - DNA, 33 bp, Homo sapiens
tgagattttgcagtctsactggtggaaatagac

SEQ ID NO: 4815 - DNA, 33 bp, Homo sapiens
tgcaaacacgaggaggmacaaagagaacggatt

SEQ ID NO: 4816 - DNA, 33 bp, Homo sapiens
tgcacacagagatgaaygggcgaggcttctcac

SEQ ID NO: 4817 - DNA, 33 bp, Homo sapiens
tgcagcctctgcaacckacttccgtgtgctttc

SEQ ID NO: 4818 - DNA, 33 bp, Homo sapiens
tgcctaaggcagatacraagaagagcaaaaaga

SEQ ID NO: 4819 - DNA, 33 bp, Homo sapiens
tgcctactttcacgtawagacaatagtattaaa

SEQ ID NO: 4820 - DNA, 33 bp, Homo sapiens
tgctgaataactgatasgttttgagaaaatttt

SEQ ID NO: 4821 - DNA, 33 bp, Homo sapiens
tgctgcagttatgtagmaagcaggttgtcatgg

SEQ ID NO: 4822 - DNA, 33 bp, Homo sapiens
tggacaggagccagaayatccaggccaacccag

SEQ ID NO: 4823 - DNA, 33 bp, Homo sapiens
tggagtctaagagtgaygtttgagctgaaaata

SEQ ID NO: 4824 - DNA, 33 bp, Homo sapiens
tggcatcaaaggtgggracctgtctttattatc

SEQ ID NO: 4825 - DNA, 33 bp, Homo sapiens
tggcctatgttggatakataagagccaagtgtt

SEQ ID NO: 4826 - DNA, 33 bp, Homo sapiens
tggtgacaagcattcayggacccaatgcaagta

SEQ ID NO: 4827 - DNA, 33 bp, Homo sapiens
tggttctgaggtgagaytaactaacctataaag

SEQ ID NO: 4828 - DNA, 33 bp, Homo sapiens
tggttgataatacctaygtcataaatttgttgg

SEQ ID NO: 4829 - DNA, 33 bp, Homo sapiens
tgtgataacaaacatcrcaggtaattttgattt

SEQ ID NO: 4830 - DNA, 33 bp, Homo sapiens
tgtgggtagtgatatayggaattagtgggaaaa

SEQ ID NO: 4831 - DNA, 33 bp, Homo sapiens
tgttgggaggctgtacragctaagtgggagtgg

SEQ ID NO: 4832 - DNA, 33 bp, Homo sapiens
tgtttaaagttaatcargaaccttactctttcc

SEQ ID NO: 4833 - DNA, 33 bp, Homo sapiens
ttaacaaatgctgtcamctatgaaggccaattt

SEQ ID NO: 4834 - DNA, 33 bp, Homo sapiens
ttatttttcagggtccycaaacaactgctctat

SEQ ID NO: 4835 - DNA, 33 bp, Homo sapiens
ttccataggagacttawgcttttggatctaaag

SEQ ID NO: 4836 - DNA, 33 bp, Homo sapiens
ttcccaagctacacaasaaggctgaagagaaga

SEQ ID NO: 4837 - DNA, 33 bp, Homo sapiens
ttccctgaataatcackcttgccattacttgtc

SEQ ID NO: 4838 - DNA, 33 bp, Homo sapiens
ttgactgaatacttagycactgcataaaaaatg

SEQ ID NO: 4839 - DNA, 33 bp, Homo sapiens
ttgctaaagatcacacmgtaagtaaatgaaaca

SEQ ID NO: 4840 - DNA, 33 bp, Homo sapiens
ttgcttacagggaaacrctatctgagacaagct

SEQ ID NO: 4841 - DNA, 33 bp, Homo sapiens
ttggacttgacgtttcycagtctggtgtggctt

SEQ ID NO: 4842 - DNA, 33 bp, Homo sapiens
ttggagttggtagacawcttgtgaaaggaatca

SEQ ID NO: 4843 - DNA, 33 bp, Homo sapiens
ttgggacaagtcgaatragctctctaaactttg

SEQ ID NO: 4844 - DNA, 33 bp, Homo sapiens
ttgtcataataactacmatttatagagtgccta

SEQ ID NO: 4845 - DNA, 33 bp, Homo sapiens
ttgtcttctcgctctakaaccccagcttaatga

SEQ ID NO: 4846 - DNA, 33 bp, Homo sapiens
ttgtgggagtactttcyaatggtatccgctgat

SEQ ID NO: 4847 - DNA, 33 bp, Homo sapiens
ttgttgacttcctagcyatggtctttaaagctt

SEQ ID NO: 4848 - DNA, 33 bp, Homo sapiens
tttacacgtaagtcacmaataacacccagtgtg

SEQ ID NO: 4849 - DNA, 33 bp, Homo sapiens
tttattacttcccacartataatggttccctga

SEQ ID NO: 4850 - DNA, 33 bp, Homo sapiens
tttccagctgtgagacraaggagcaaatatgag

SEQ ID NO: 4851 - DNA, 33 bp, Homo sapiens
tttcgacgggttctgtracaaatgtccacagac

SEQ ID NO: 4852 - DNA, 33 bp, Homo sapiens
tttggagcctacagcaytaggatgaggattaaa

SEQ ID NO: 4853 - DNA, 33 bp, Homo sapiens
ttttgacaacctgctayaaataatgaggctttt

SEQ ID NO: 4854 - DNA, 33 bp, Homo sapiens
ttttgtccttatttcawtcagtgcggtagtgag

SEQ ID NO: 4855 - DNA, 33 bp, Homo sapiens
tttttgtatttggaaarctttgggtattgaaag

SEQ ID NO: 4856 - DNA, 33 bp, Homo sapiens
ttttttttatcagttayacagctcttagcacga

SEQ ID NO: 4857 - DNA, 33 bp, Homo sapiens
tttacaaagcatctcasctgtctccttgatcac

SEQ ID NO: 4858 - DNA, 33 bp, Homo sapiens
tctgcagttactctcaytaagaagtatgttaac

SEQ ID NO: 4859 - DNA, 33 bp, Homo sapiens
aaaaagtgagagtggcraaaagtatacttgata

SEQ ID NO: 4860 - DNA, 33 bp, Homo sapiens
gccaaaagattgatacmgcctgaaaggagagtg

SEQ ID NO: 4861 - DNA, 33 bp, Homo sapiens
tgcactgaaatgtccaygttcaaagtctaagga

SEQ ID NO: 4862 - DNA, 33 bp, Homo sapiens
gacttgtatcatttacrctatttgtcccagaac

SEQ ID NO: 4863 - DNA, 33 bp, Homo sapiens
caatgttactcatgaamagtagatgatttggaa

SEQ ID NO: 4864 - DNA, 33 bp, Homo sapiens
ctcttcatcttcctaartcagtaggcagttcat

SEQ ID NO: 4865 - DNA, 33 bp, Homo sapiens
gaatcactgaagtctcmaggttgatagtaagat

SEQ ID NO: 4866 - DNA, 33 bp, Homo sapiens
ccaaaagcaaagtgtaygtggagaaggtgaggg

SEQ ID NO: 4867 - DNA, 33 bp, Homo sapiens
gctcagactgctctggmaaacctgctgtctttg

SEQ ID NO: 4868 - DNA, 33 bp, Homo sapiens
ttggaggatgccataartgacctcagagattct

SEQ ID NO: 4869 - DNA, 33 bp, Homo sapiens
ggagagaggtaacacaycaatagacaggtttcc

SEQ ID NO: 4870 - DNA, 33 bp, Homo sapiens
gagactataactgcaayggtaaaaaggcaggat

SEQ ID NO: 4871 - DNA, 33 bp, Homo sapiens
atctatattgaatccarcatcttaagttgcctg

SEQ ID NO: 4872 - DNA, 33 bp, Homo sapiens
atatggtaggaccttaygtgactgaagctatct

SEQ ID NO: 4873 - DNA, 33 bp, Homo sapiens
aaatgtactcttaaatyaggcatacgttgaaga

SEQ ID NO: 4874 - DNA, 33 bp, Homo sapiens
taaatctatcagatggraaatcctgttacaaag

SEQ ID NO: 4875 - DNA, 33 bp, Homo sapiens
ctcacctaaaacctgcrgcaatttccctgagac

SEQ ID NO: 4876 - DNA, 33 bp, Homo sapiens
gacttgctgcattacastgccctttccagatct

SEQ ID NO: 4877 - DNA, 33 bp, Homo sapiens
caacagaccgtgttgartattgctttccattga

SEQ ID NO: 4878 - DNA, 33 bp, Homo sapiens
tagagataatagtaccraataatacgattgttg

SEQ ID NO: 4879 - DNA, 33 bp, Homo sapiens
gggttaaaccccagcaraaagtgagcttagttc

SEQ ID NO: 4880 - DNA, 33 bp, Homo sapiens
aaatactcaactccgamtagctctagtgtttca

SEQ ID NO: 4881 - DNA, 33 bp, Homo sapiens
attgtatggcccattakcaaacagaacgcattc

SEQ ID NO: 4882 - DNA, 33 bp, Homo sapiens
tatgaaagaatgttcaycacaactttactcaga

SEQ ID NO: 4883 - DNA, 33 bp, Homo sapiens
atatcaaaagacaatcygatggaaacaacccaa

SEQ ID NO: 4884 - DNA, 33 bp, Homo sapiens
aaaaacgtctgttacayagttatgctcttttcg

SEQ ID NO: 4885 - DNA, 33 bp, Homo sapiens
aaaaattaacttttgarcaaatgcaagtgttaa

SEQ ID NO: 4886 - DNA, 33 bp, Homo sapiens
aaaatgatctatgacaygggaatatttggagtt

SEQ ID NO: 4887 - DNA, 33 bp, Homo sapiens
aaaatgtctgcctatgraacaactcacatcaca

SEQ ID NO: 4888 - DNA, 33 bp, Homo sapiens
aaaatgtggattcaaargtcttagatattaagt

SEQ ID NO: 4889 - DNA, 33 bp, Homo sapiens
aaactaggaagccaaargtttagaaaataacaa

SEQ ID NO: 4890 - DNA, 33 bp, Homo sapiens
aaataatttcatcttcrcagtttaagaaggtgg

SEQ ID NO: 4891 - DNA, 33 bp, Homo sapiens
aaatactatacactggmacataaagaacatatg

SEQ ID NO: 4892 - DNA, 33 bp, Homo sapiens
aaatggctgcattagayggcaaacaagaggtaa

SEQ ID NO: 4893 - DNA, 33 bp, Homo sapiens
aacattgagcttgaacygcactttagatcaaat

SEQ ID NO: 4894 - DNA, 33 bp, Homo sapiens
aactctttttgtgtgawaatgagagaagaggtg

SEQ ID NO: 4895 - DNA, 33 bp, Homo sapiens
aagagttgaaagaatargacaatgaacacctat

SEQ ID NO: 4896 - DNA, 33 bp, Homo sapiens
aagatgtggcagctccratatcgccaatctggc

SEQ ID NO: 4897 - DNA, 33 bp, Homo sapiens
aagccagaagtattctyacctagtccagtacta

SEQ ID NO: 4898 - DNA, 33 bp, Homo sapiens
aagctataggtatgtcraaagagctagaaaggc

SEQ ID NO: 4899 - DNA, 33 bp, Homo sapiens
aagggccagaagttgamcttaggagacaaagat

SEQ ID NO: 4900 - DNA, 33 bp, Homo sapiens
aagtcaaggttctaaaygtctaaaagtcactga

SEQ ID NO: 4901 - DNA, 33 bp, Homo sapiens
aataaaacaagaactaygtggtttgctatattt

SEQ ID NO: 4902 - DNA, 33 bp, Homo sapiens
aatatagcataagttaragctagagaccttaaa

SEQ ID NO: 4903 - DNA, 33 bp, Homo sapiens
aatccatcatcaggacmgtacaaattaaaacaa

SEQ ID NO: 4904 - DNA, 33 bp, Homo sapiens
aatctcaactgggaaamtgctttaaagaaatca

SEQ ID NO: 4905 - DNA, 33 bp, Homo sapiens
aatgtaatgtggaatamagaattggtcctgaac

SEQ ID NO: 4906 - DNA, 33 bp, Homo sapiens
aattgaagattttgcayggtgtcttcagcagta

SEQ ID NO: 4907 - DNA, 33 bp, Homo sapiens
aattggaagcatgatawggaacaccggttaaaa

SEQ ID NO: 4908 - DNA, 33 bp, Homo sapiens
acaaaaacagtatgatsagaggctcacagggac

SEQ ID NO: 4909 - DNA, 33 bp, Homo sapiens
acaatatcacagcatasatataaactttctgcg

SEQ ID NO: 4910 - DNA, 33 bp, Homo sapiens
acaccggtcccgatccrcttctactatcacacg

SEQ ID NO: 4911 - DNA, 33 bp, Homo sapiens
accaagctggttagcarcaaaaacaaatagctt

SEQ ID NO: 4912 - DNA, 33 bp, Homo sapiens
acctctatttagtcacraatttctgcaatatca

SEQ ID NO: 4913 - DNA, 33 bp, Homo sapiens
acgtgccatagatccamccctcgctggtgctgg

SEQ ID NO: 4914 - DNA, 33 bp, Homo sapiens
actctgtacaatcttasgataaaagcttgaaga

SEQ ID NO: 4915 - DNA, 33 bp, Homo sapiens
actgaagctaccaggcmgacttaaaagtaaccc

SEQ ID NO: 4916 - DNA, 33 bp, Homo sapiens
agaaaaaacgtaaccayaagaaatgtgaaagta

SEQ ID NO: 4917 - DNA, 33 bp, Homo sapiens
agaaatttggtgtgacygaagaaatggtggaca

SEQ ID NO: 4918 - DNA, 33 bp, Homo sapiens
agaggctttttatctarcagcagtcaacaaaga

SEQ ID NO: 4919 - DNA, 33 bp, Homo sapiens
agataaccgaagctaaytgaccacatcctactt

SEQ ID NO: 4920 - DNA, 33 bp, Homo sapiens
agcactttacatctgcsaactcattattcagtt

SEQ ID NO: 4921 - DNA, 33 bp, Homo sapiens
agctgttctggagcaamaatactgtaaaattag

SEQ ID NO: 4922 - DNA, 33 bp, Homo sapiens
agcttccaactacgaaygatattttagaagaga

SEQ ID NO: 4923 - DNA, 33 bp, Homo sapiens
aggcacttagcatacarcaattaagatggaagt

SEQ ID NO: 4924 - DNA, 33 bp, Homo sapiens
aggccactgaagctacsggatttaggcttggga

SEQ ID NO: 4925 - DNA, 33 bp, Homo sapiens
agggtttgcgtaagacraaagagaaagagagag

SEQ ID NO: 4926 - DNA, 33 bp, Homo sapiens
aggtctgaaatagggcrgcaatatttccactgc

SEQ ID NO: 4927 - DNA, 33 bp, Homo sapiens
agtcaggaacttgcacygctgccgaggcaatgc

SEQ ID NO: 4928 - DNA, 33 bp, Homo sapiens
agtctacaaacaacacrgagtaataacattata

SEQ ID NO: 4929 - DNA, 33 bp, Homo sapiens
agtgatttgcttttgayaatcctgtgaggcagg

SEQ ID NO: 4930 - DNA, 33 bp, Homo sapiens
agtgctgaaaccaggayggatatggaaaaacta

SEQ ID NO: 4931 - DNA, 33 bp, Homo sapiens
agtgttctggtctggaygaaatgagagaactcc

SEQ ID NO: 4932 - DNA, 33 bp, Homo sapiens
agttggggaatagtaaygcaagttgaataaaac

SEQ ID NO: 4933 - DNA, 33 bp, Homo sapiens
ataccactctttggacracacattagcctaatt

SEQ ID NO: 4934 - DNA, 33 bp, Homo sapiens
atacctagaattaacayatgacccaataatttc

SEQ ID NO: 4935 - DNA, 33 bp, Homo sapiens
atatacctgttattcascaaagaaacctacagc

SEQ ID NO: 4936 - DNA, 33 bp, Homo sapiens
atccagattcgagaaasagtgtctagctatgtc

SEQ ID NO: 4937 - DNA, 33 bp, Homo sapiens
tccattgcaagaacccrataagtcactcaacac

SEQ ID NO: 4938 - DNA, 33 bp, Homo sapiens
atgaatatgagcatcakgaagtagaaatagaag

SEQ ID NO: 4939 - DNA, 33 bp, Homo sapiens
atgaggtatgtttcaartcatgaaaggctttga

SEQ ID NO: 4940 - DNA, 33 bp, Homo sapiens
atgcaaaatgcacataktagtaattagtcaaac

SEQ ID NO: 4941 - DNA, 33 bp, Homo sapiens
atgtattttagggaaayctggtactggctgtta

SEQ ID NO: 4942 - DNA, 33 bp, Homo sapiens
attattaaatgcctcamgacttaacggtcagcc

SEQ ID NO: 4943 - DNA, 33 bp, Homo sapiens
attcctaatcctggaaygaatagccctgcgtca

SEQ ID NO: 4944 - DNA, 33 bp, Homo sapiens
attcggaaatcctaaargcaaatcttaatagaa

SEQ ID NO: 4945 - DNA, 33 bp, Homo sapiens
attctgagatctttccrctatttcaggctctag

SEQ ID NO: 4946 - DNA, 33 bp, Homo sapiens
caaaaaaggccttgcaygtgtgattaagtcaag

SEQ ID NO: 4947 - DNA, 33 bp, Homo sapiens
caagggaatcatgaagsctctgggccagtctat

SEQ ID NO: 4948 - DNA, 33 bp, Homo sapiens
cacacacacataatagwatactgttaagccatt

SEQ ID NO: 4949 - DNA, 33 bp, Homo sapiens
cacacacatgggtgaayaccatctaataatgaa

SEQ ID NO: 4950 - DNA, 33 bp, Homo sapiens
tattattttagacaacragtgctgcagagggaa

SEQ ID NO: 4951 - DNA, 33 bp, Homo sapiens
cacatttacattttatyaggtgaaattatctca

SEQ ID NO: 4952 - DNA, 33 bp, Homo sapiens
cattttattcatcgtarcaattgtcacagtaca

SEQ ID NO: 4953 - DNA, 33 bp, Homo sapiens
cacctaggcgaatatawacaagactcaaaagca

SEQ ID NO: 4954 - DNA, 33 bp, Homo sapiens
cacgtgttatttgcaargagaatctgaatgata

SEQ ID NO: 4955 - DNA, 33 bp, Homo sapiens
cactgctacatcctcasagttaaggaaaatatt

SEQ ID NO: 4956 - DNA, 33 bp, Homo sapiens
cagaatagtgagaaatraatcattgtctttgtt

SEQ ID NO: 4957 - DNA, 33 bp, Homo sapiens
aaaaccaaatctgaaaytgaagcccagagacaa

SEQ ID NO: 4958 - DNA, 33 bp, Homo sapiens
cagagccacaccccaayttctagattattttct

SEQ ID NO: 4959 - DNA, 33 bp, Homo sapiens
cagatacagaatgcacrgtatttgccgcagaat

SEQ ID NO: 4960 - DNA, 33 bp, Homo sapiens
cagatctgcagcagaayttattacagttagatt

SEQ ID NO: 4961 - DNA, 33 bp, Homo sapiens
cagcactttgtaatgaraatcatgttgggcctg

SEQ ID NO: 4962 - DNA, 33 bp, Homo sapiens
caggatgtgccttaggyataatgtcaaatgggc

SEQ ID NO: 4963 - DNA, 33 bp, Homo sapiens
caggtaagtacacagaygagagaaaccataaag

SEQ ID NO: 4964 - DNA, 33 bp, Homo sapiens
cagttttcttctggcayagtgtagaggtagaca

SEQ ID NO: 4965 - DNA, 33 bp, Homo sapiens
cattaaatattaatcgwatgaatgagtgtgttg

SEQ ID NO: 4966 - DNA, 33 bp, Homo sapiens
catttccaagaagcaaygcaaagtaagttttcc

SEQ ID NO: 4967 - DNA, 33 bp, Homo sapiens
ccacgactctaaatgayctgcttttactcttca

SEQ ID NO: 4968 - DNA, 33 bp, Homo sapiens
cccactgagccactaasaagcctggatatgaga

SEQ ID NO: 4969 - DNA, 33 bp, Homo sapiens
ccccatttgcaacttamagcttcatcacctagg

SEQ ID NO: 4970 - DNA, 33 bp, Homo sapiens
cccgtggaatttcttarcaagcatagagttaga

SEQ ID NO: 4971 - DNA, 33 bp, Homo sapiens
ccctgccctaatcaccragcagacaggcaacat

SEQ ID NO: 4972 - DNA, 33 bp, Homo sapiens
ccctggtaatctcttaygttggtgcaaaattag

SEQ ID NO: 4973 - DNA, 33 bp, Homo sapiens
ccgggtagtcttggcartgagaagacactccat

SEQ ID NO: 4974 - DNA, 33 bp, Homo sapiens
cgagactctgaggttgraaaaggtcattaagac

SEQ ID NO: 4975 - DNA, 33 bp, Homo sapiens
ctaccaacactgtgagraaatttggatatggaa

SEQ ID NO: 4976 - DNA, 33 bp, Homo sapiens
ctcccccattaactcarcattctctatcttctc

SEQ ID NO: 4977 - DNA, 33 bp, Homo sapiens
ctctgtaattcttacartaaccagcaaagtcgg

SEQ ID NO: 4978 - DNA, 33 bp, Homo sapiens
ctctttgtaggctgaarggaagtttgaagaaaa

SEQ ID NO: 4979 - DNA, 33 bp, Homo sapiens
ctggcacgttgtacatwatcaattgggatcaca

SEQ ID NO: 4980 - DNA, 33 bp, Homo sapiens
ctggcactgaagcactractatcttgaattctg

SEQ ID NO: 4981 - DNA, 33 bp, Homo sapiens
ctgggagagggacacartgtaaatctaggcatt

SEQ ID NO: 4982 - DNA, 33 bp, Homo sapiens
ctgtggtccagctctasacgccaaaaggagaga

SEQ ID NO: 4983 - DNA, 33 bp, Homo sapiens
cttaacttttccatcaygtttctcatctattta

SEQ ID NO: 4984 - DNA, 33 bp, Homo sapiens
cttacagacctgatgcrcagccttcctttccca

SEQ ID NO: 4985 - DNA, 33 bp, Homo sapiens
cttgatggtttcccacygcgctaagggcttgcc

SEQ ID NO: 4986 - DNA, 33 bp, Homo sapiens
ctttgaatgaatggacraggtttcataacacat

SEQ ID NO: 4987 - DNA, 33 bp, Homo sapiens
ctttgtgagaatgagamataagcacctctccta

SEQ ID NO: 4988 - DNA, 33 bp, Homo sapiens
cttttccctctcaagarccagaaacaaagagcc

SEQ ID NO: 4989 - DNA, 33 bp, Homo sapiens
gaaaacaaaaagattaygcaagaggtcaagaag

SEQ ID NO: 4990 - DNA, 33 bp, Homo sapiens
gaaacagtcatgacacsgatttccaggaagaga

SEQ ID NO: 4991 - DNA, 33 bp, Homo sapiens
gaaagctgataaaagasatgctaatggcaatga

SEQ ID NO: 4992 - DNA, 33 bp, Homo sapiens
gaaatgcagcatctcaratagttcagcagggaa

SEQ ID NO: 4993 - DNA, 33 bp, Homo sapiens
gaactgcttggggcttraaccacagcaattcaa

SEQ ID NO: 4994 - DNA, 33 bp, Homo sapiens
gaagctttacaaactayggtggtgatgtccagt

SEQ ID NO: 4995 - DNA, 33 bp, Homo sapiens
gaaggcctgtgactgcraggggcacgaacacac

SEQ ID NO: 4996 - DNA, 33 bp, Homo sapiens
gaatggtacctctttarccatcagttgggcaca

SEQ ID NO: 4997 - DNA, 33 bp, Homo sapiens
agtgcttttttgagtcwctcaatccttcataaa

SEQ ID NO: 4998 - DNA, 33 bp, Homo sapiens
gacgtcactagatcccrcagttcgaagatgtta

SEQ ID NO: 4999 - DNA, 33 bp, Homo sapiens
gagccaggcaatttaaytcttaggacttttatc

SEQ ID NO: 5000 - DNA, 33 bp, Homo sapiens
gatatagcaatagccartaagcatctaaaatga

SEQ ID NO: 5001 - DNA, 33 bp, Homo sapiens
gcaagtccaaagtagaygtaagcaagaggccag

SEQ ID NO: 5002 - DNA, 33 bp, Homo sapiens
gcacagagagggtgagmaacttatccaaggtca

SEQ ID NO: 5003 - DNA, 33 bp, Homo sapiens
gcacagagtagaggcayggtaacgatgtgttgt

SEQ ID NO: 5004 - DNA, 33 bp, Homo sapiens
gcactctgccctctgaygttgtgttttcccagg

SEQ ID NO: 5005 - DNA, 33 bp, Homo sapiens
gcacttgtgcttgataraggcagagtaagttga

SEQ ID NO: 5006 - DNA, 33 bp, Homo sapiens
gcaggatgaaagcgggkaatcatttttcaaaat

SEQ ID NO: 5007 - DNA, 33 bp, Homo sapiens
gcatccaggaaaagcaytgctgggaaggtgata

SEQ ID NO: 5008 - DNA, 33 bp, Homo sapiens
gcctgcagctaggctasagagagttctggaaga

SEQ ID NO: 5009 - DNA, 33 bp, Homo sapiens
gcgcccggccttctccsaggttttaagtgaggc

SEQ ID NO: 5010 - DNA, 33 bp, Homo sapiens
gctcgttaagacaaagmattttatagcagttgc

SEQ ID NO: 5011 - DNA, 33 bp, Homo sapiens
ggaacacttttcagaaytgcttgattccatggc

SEQ ID NO: 5012 - DNA, 33 bp, Homo sapiens
ggaatttttgtagcccraagaaacaagagccta

SEQ ID NO: 5013 - DNA, 33 bp, Homo sapiens
ggacaactcataggtayctgcttagattctgag

SEQ ID NO: 5014 - DNA, 33 bp, Homo sapiens
ggagtctatgcataaamctggctgtagatatgc

SEQ ID NO: 5015 - DNA, 33 bp, Homo sapiens
gtattcaaatcacccaragtatattttatggca

SEQ ID NO: 5016 - DNA, 33 bp, Homo sapiens
acttaagggtgcatttrtctgctgagtgaaact

SEQ ID NO: 5017 - DNA, 33 bp, Homo sapiens
gtgactgcattgtgaawgtttctctactataga

SEQ ID NO: 5018 - DNA, 33 bp, Homo sapiens
taaaggcatatcaaaayttcccaattaaaacag

SEQ ID NO: 5019 - DNA, 33 bp, Homo sapiens
tccaagaagcctatgawctactgggggagacag

SEQ ID NO: 5020 - DNA, 33 bp, Homo sapiens
tgaattttacctcccawaatcctcatacatcat

SEQ ID NO: 5021 - DNA, 33 bp, Homo sapiens
ttatccccccacggaayggatcaaggctcatgg

SEQ ID NO: 5022 - DNA, 33 bp, Homo sapiens
ttcagatatatgaagcwagacaaaaacctcaag

SEQ ID NO: 5023 - DNA, 33 bp, Homo sapiens
aggctgaacattgattyaaagttaccctgaggt

SEQ ID NO: 5024 - DNA, 33 bp, Homo sapiens
gaagatctgctaagcargtaagggaaataaata

SEQ ID NO: 5025 - DNA, 33 bp, Homo sapiens
aatttgttctgtagtcyagagtgtaattaaaag

SEQ ID NO: 5026 - DNA, 33 bp, Homo sapiens
ctgtaatcatatgggaratcttgaattaaagag

SEQ ID NO: 5027 - DNA, 33 bp, Homo sapiens
agacaaggcaaggcccratcttgcaagtactgc

SEQ ID NO: 5028 - DNA, 33 bp, Homo sapiens
aggagagggttagaaartatggaatgaaaatag

SEQ ID NO: 5029 - DNA, 33 bp, Homo sapiens
attagttctaaagcagraggaagacttagagaa

SEQ ID NO: 5030 - DNA, 33 bp, Homo sapiens
attctaactgatgttargtgtgattcaagccca

SEQ ID NO: 5031 - DNA, 33 bp, Homo sapiens
cacacacatacacaaarcaggcagcttgccaaa

SEQ ID NO: 5032 - DNA, 33 bp, Homo sapiens
gatttcccaagtgacaratacccttgatatgtc

SEQ ID NO: 5033 - DNA, 33 bp, Homo sapiens
gctcctaccatcaaatrattcatcatagcctat

SEQ ID NO: 5034 - DNA, 33 bp, Homo sapiens
aagaggcaaaaatgaaygcaactaagtcactta

SEQ ID NO: 5035 - DNA, 33 bp, Homo sapiens
ggattgaaaatttgaaygtttgctcaatccaca

SEQ ID NO: 5036 - DNA, 33 bp, Homo sapiens
ggggccctgttggttcrctgatcatgagaacct

SEQ ID NO: 5037 - DNA, 33 bp, Homo sapiens
gtccaaatagaaacaayggcagtcagaggctcc

SEQ ID NO: 5038 - DNA, 33 bp, Homo sapiens
gtggatgagcatattcraagtggcttgtagcca

SEQ ID NO: 5039 - DNA, 33 bp, Homo sapiens
caacaacagtaggttartactcagaatgtttgg

SEQ ID NO: 5040 - DNA, 33 bp, Homo sapiens
tacctgaaagatttcasccattaagcctgacac

SEQ ID NO: 5041 - DNA, 33 bp, Homo sapiens
tggtgtttgaagtgaarcttttagcacagttga

SEQ ID NO: 5042 - DNA, 33 bp, Homo sapiens
tgtgatgaaatttgaayccaagaagcttgcctc

SEQ ID NO: 5043 - DNA, 33 bp, Homo sapiens
ttgggattacaggtacraatcactgcacacagc

SEQ ID NO: 5044 - DNA, 33 bp, Homo sapiens
ttgttattggtctatckagtctttatatgtctt

SEQ ID NO: 5045 - DNA, 33 bp, Homo sapiens
ttgttgttgagtaatgyaatcttatcttcatgg

SEQ ID NO: 5046 - DNA, 33 bp, Homo sapiens
tttcctctctctgtcaytcttgatcttccttct

SEQ ID NO: 5047 - DNA, 33 bp, Homo sapiens
gattctgcacattatcratattaacagctccag

SEQ ID NO: 5048 - DNA, 33 bp, Homo sapiens
cccttatctttgctccrgactaacctgtggctg

SEQ ID NO: 5049 - DNA, 33 bp, Homo sapiens
tagcaacaatcatgcayagtgtgcctctacttc

SEQ ID NO: 5050 - DNA, 33 bp, Homo sapiens
aaattttcataccaaaycccctcatcctctctt

SEQ ID NO: 5051 - DNA, 33 bp, Homo sapiens
actgctctacccttgckaccttaaactgtacct

SEQ ID NO: 5052 - DNA, 33 bp, Homo sapiens
agaattgtggggtccakcaagccctagtgggac

SEQ ID NO: 5053 - DNA, 33 bp, Homo sapiens
aggaaattggattaatraaacctggcacgtatt

SEQ ID NO: 5054 - DNA, 33 bp, Homo sapiens
atcctgggtattgtccrctaccaaaacagcttg

SEQ ID NO: 5055 - DNA, 33 bp, Homo sapiens
caccaaaacacatgaawtaaccaaagcatttta

SEQ ID NO: 5056 - DNA, 33 bp, Homo sapiens
cctgtatcaagccaaaygtgttctttcattctg

SEQ ID NO: 5057 - DNA, 33 bp, Homo sapiens
cgcatgtgggctcagaraccgctggagcagagt

SEQ ID NO: 5058 - DNA, 33 bp, Homo sapiens
ctattgatattgatcayctggccaatgcactgt

SEQ ID NO: 5059 - DNA, 33 bp, Homo sapiens
ctgacttgcaaaaacayaattaggttgaatgga

SEQ ID NO: 5060 - DNA, 33 bp, Homo sapiens
gcatgcaattgtagagwctaggacacttggtga

SEQ ID NO: 5061 - DNA, 33 bp, Homo sapiens
gcctagtagtcaagcayagttctaccctccagc

SEQ ID NO: 5062 - DNA, 33 bp, Homo sapiens
agttcagactgtactcycccactatcaattcag

SEQ ID NO: 5063 - DNA, 33 bp, Homo sapiens
agagtccaaagctccakgttagaggctggaagt

SEQ ID NO: 5064 - DNA, 33 bp, Homo sapiens
aggaagatgtgttattwaaccaggtagtccctc

SEQ ID NO: 5065 - DNA, 33 bp, Homo sapiens
atcctagagagacaaarcagagtgagccagtgg

SEQ ID NO: 5066 - DNA, 33 bp, Homo sapiens
atcctgcaaggattcargatagttttaccaata

SEQ ID NO: 5067 - DNA, 33 bp, Homo sapiens
atgaaaaacgtttgaasttaatcatagttgaag

SEQ ID NO: 5068 - DNA, 33 bp, Homo sapiens
atggttcagactaacaytggtggtgatattaac

SEQ ID NO: 5069 - DNA, 33 bp, Homo sapiens
caggttgagttcccatyaggattttgacatgaa

SEQ ID NO: 5070 - DNA, 33 bp, Homo sapiens
gatgtatgtacatttcyaatttcaccttttcac

SEQ ID NO: 5071 - DNA, 33 bp, Homo sapiens
gcacaactgattttcakcctcagaaagagaagt

SEQ ID NO: 5072 - DNA, 33 bp, Homo sapiens
acccatgttttgttaargtcattttgggccatg

SEQ ID NO: 5073 - DNA, 33 bp, Homo sapiens
gaagctattagttttaygccacttcatagagag

SEQ ID NO: 5074 - DNA, 33 bp, Homo sapiens
tttaaggtctgaactgragaagagaagagagga

SEQ ID NO: 5075 - DNA, 33 bp, Homo sapiens
acaatatggtgataaasatgcatgcatacagaa

SEQ ID NO: 5076 - DNA, 33 bp, Homo sapiens
acaacatagtaagaggwcattgttaacattaag

SEQ ID NO: 5077 - DNA, 33 bp, Homo sapiens
ggcagtgtaagagagayggaagatagataaaag

SEQ ID NO: 5078 - DNA, 33 bp, Homo sapiens
ggcatcacaagtcagamggaatcttgtgcaaag

SEQ ID NO: 5079 - DNA, 33 bp, Homo sapiens
ggccctcttctgtgccratttcacacacattaa

SEQ ID NO: 5080 - DNA, 33 bp, Homo sapiens
ggcctagctgcttctgwcagaaccaacattttg

SEQ ID NO: 5081 - DNA, 33 bp, Homo sapiens
gggaagcttggatcaaygaactgggcagcctta

SEQ ID NO: 5082 - DNA, 33 bp, Homo sapiens
gggagctgaattctccrgcgacagttgttgggg

SEQ ID NO: 5083 - DNA, 33 bp, Homo sapiens
gggtgtcttgcagtgaraaagagagactggact

SEQ ID NO: 5084 - DNA, 33 bp, Homo sapiens
gggttattttcccaccygaagtcacagagcatt

SEQ ID NO: 5085 - DNA, 33 bp, Homo sapiens
ggttttcctttcagccygatacagagacctggg

SEQ ID NO: 5086 - DNA, 33 bp, Homo sapiens
gtaaccatggaccccartgcaatgtattcttga

SEQ ID NO: 5087 - DNA, 33 bp, Homo sapiens
gtacacatgagaagttmaaagtgctctgtgttg

SEQ ID NO: 5088 - DNA, 33 bp, Homo sapiens
gtactgatcgagtaaartgttgctaatctattg

SEQ ID NO: 5089 - DNA, 33 bp, Homo sapiens
gtaggttctaccatcartcagctgggcctgaat

SEQ ID NO: 5090 - DNA, 33 bp, Homo sapiens
gtagtttgagatgttaygcagattcttgtgacc

SEQ ID NO: 5091 - DNA, 33 bp, Homo sapiens
gtataacagaaatttamagacatacacatttaa

SEQ ID NO: 5092 - DNA, 33 bp, Homo sapiens
gtcaccagtttcaatayaggaataagctgtgct

SEQ ID NO: 5093 - DNA, 33 bp, Homo sapiens
gtctgctgagctactayggagtcacaaatgaca

SEQ ID NO: 5094 - DNA, 33 bp, Homo sapiens
gtgagtgaccgactagrcagtttgttccagctt

SEQ ID NO: 5095 - DNA, 33 bp, Homo sapiens
gtgcataactcagatasatggcaggatgaaaaa

SEQ ID NO: 5096 - DNA, 33 bp, Homo sapiens
gtgctagaaagttataraatggcacaaggcatg

SEQ ID NO: 5097 - DNA, 33 bp, Homo sapiens
gtgctttgctctgttayattttaagtatcttct

SEQ ID NO: 5098 - DNA, 33 bp, Homo sapiens
gtgtgaacaagtcatayatttccatctgcaaag

SEQ ID NO: 5099 - DNA, 33 bp, Homo sapiens
gtgtgactctgaaaaarttgcttgtgtcaatct

SEQ ID NO: 5100 - DNA, 33 bp, Homo sapiens
gttaaccacctagaagmcaaaatgtaaaaggaa

SEQ ID NO: 5101 - DNA, 33 bp, Homo sapiens
gttacagcaagaattcraactactaatcaagac

SEQ ID NO: 5102 - DNA, 33 bp, Homo sapiens
gttctaagcaataagawgaaatcaagagaatgc

SEQ ID NO: 5103 - DNA, 33 bp, Homo sapiens
gttgtcattaacctagraattcatccgagttac

SEQ ID NO: 5104 - DNA, 33 bp, Homo sapiens
gtttctactgaaaacaycggctgaagaaggcag

SEQ ID NO: 5105 - DNA, 33 bp, Homo sapiens
taaaagtgtgtaacaaytccccctactctctct

SEQ ID NO: 5106 - DNA, 33 bp, Homo sapiens
taaacctgcttcatagragagcacattaagctg

SEQ ID NO: 5107 - DNA, 33 bp, Homo sapiens
taacctcctactattaygatcctggagtgcaaa

SEQ ID NO: 5108 - DNA, 33 bp, Homo sapiens
taacttgccaatgtaayaagttagtgtcaaagc

SEQ ID NO: 5109 - DNA, 33 bp, Homo sapiens
taagacctcgtctaaarcatatagtctgtcctg

SEQ ID NO: 5110 - DNA, 33 bp, Homo sapiens
tactagctgatgccagsaggtgccaaaggttgt

SEQ ID NO: 5111 - DNA, 33 bp, Homo sapiens
tagaaaaaaataggtargattggcaatcagcag

SEQ ID NO: 5112 - DNA, 33 bp, Homo sapiens
tagaatgagtacaagcwcctttttacccttatc

SEQ ID NO: 5113 - DNA, 33 bp, Homo sapiens
tagagtgagattctgaycataggacatgaaatg

SEQ ID NO: 5114 - DNA, 33 bp, Homo sapiens
aacgttgtgagaaatcrcttcaaaccttttctc

SEQ ID NO: 5115 - DNA, 33 bp, Homo sapiens
tagcaatggaaagctcwgaaagtctgaagagat

SEQ ID NO: 5116 - DNA, 33 bp, Homo sapiens
tagcttgagtccgaacrcagtcctctaggagaa

SEQ ID NO: 5117 - DNA, 33 bp, Homo sapiens
taggaacatagatgaaygagagattacttttcc

SEQ ID NO: 5118 - DNA, 33 bp, Homo sapiens
tagtatgttaattcagrcggctatgcatggttg

SEQ ID NO: 5119 - DNA, 33 bp, Homo sapiens
tagtcaacaaatcaagraaggccagacactgag

SEQ ID NO: 5120 - DNA, 33 bp, Homo sapiens
tagttgcaggaaaatayggtccaaccagtttca

SEQ ID NO: 5121 - DNA, 33 bp, Homo sapiens
tatctatttcttgaacwgtctctacgagccagg

SEQ ID NO: 5122 - DNA, 33 bp, Homo sapiens
tatgggagctgattgaygggtcatgtaagatcc

SEQ ID NO: 5123 - DNA, 33 bp, Homo sapiens
tattacatcctaggtayaatgtaacaggagcaa

SEQ ID NO: 5124 - DNA, 33 bp, Homo sapiens
tattccataagggcaawctctttttttcataca

SEQ ID NO: 5125 - DNA, 33 bp, Homo sapiens
tattctcttggcctcastaactagcctactcct

SEQ ID NO: 5126 - DNA, 33 bp, Homo sapiens
tattgatgaaaaagagyccttaatctccttctg

SEQ ID NO: 5127 - DNA, 33 bp, Homo sapiens
tatttatgagtatctastacatgacgaacagtt

SEQ ID NO: 5128 - DNA, 33 bp, Homo sapiens
tatttccactagactargttaaatatgtgagaa

SEQ ID NO: 5129 - DNA, 33 bp, Homo sapiens
tatttctaaataattcwaacttttgctttctgc

SEQ ID NO: 5130 - DNA, 33 bp, Homo sapiens
tattttagcagaagccmaacagaagtggcagca

SEQ ID NO: 5131 - DNA, 33 bp, Homo sapiens
tcaaacagacaaaaaayggtttcatcaaattgt

SEQ ID NO: 5132 - DNA, 33 bp, Homo sapiens
tcagagtatgaaggaargtttgtatctcagaag

SEQ ID NO: 5133 - DNA, 33 bp, Homo sapiens
tcagtcatgtgcaaatyacccttcatacgttca

SEQ ID NO: 5134 - DNA, 33 bp, Homo sapiens
ggaatgcagctgcgaawatgaaggcgatagata

SEQ ID NO: 5135 - DNA, 33 bp, Homo sapiens
tccagacagtgtaggaracctgctcacaccaca

SEQ ID NO: 5136 - DNA, 33 bp, Homo sapiens
tccatggtttacaatgyagtgcagtcagagaac

SEQ ID NO: 5137 - DNA, 33 bp, Homo sapiens
tcccagttctctcttgyaaagcccctatttcaa

SEQ ID NO: 5138 - DNA, 33 bp, Homo sapiens
tccccagcctataatarcttctctgtctttcct

SEQ ID NO: 5139 - DNA, 33 bp, Homo sapiens
tccttacaatgccctaygcggcctaaataatct

SEQ ID NO: 5140 - DNA, 33 bp, Homo sapiens
tccttttagaaacacaygagcaaattgcagtga

SEQ ID NO: 5141 - DNA, 33 bp, Homo sapiens
tcgcgttcttaagcacygaattagttttggaca

SEQ ID NO: 5142 - DNA, 33 bp, Homo sapiens
tctaatttttgagatayagggacttctctggag

SEQ ID NO: 5143 - DNA, 33 bp, Homo sapiens
tctaggtgcttttgtaygtgtctactgatggat

SEQ ID NO: 5144 - DNA, 33 bp, Homo sapiens
tctcaaagcctcatccrctgattccagcaatga

SEQ ID NO: 5145 - DNA, 33 bp, Homo sapiens
ccctctaggcaagctcwccctttcccgcagctc

SEQ ID NO: 5146 - DNA, 33 bp, Homo sapiens
tcttctcacggttgcaytgaggaaaagtctcct

SEQ ID NO: 5147 - DNA, 33 bp, Homo sapiens
tctttgacttactcatyaccaactccaactgta

SEQ ID NO: 5148 - DNA, 33 bp, Homo sapiens
tgaaaggacaattgagragacccagagaacgca

SEQ ID NO: 5149 - DNA, 33 bp, Homo sapiens
tgaaatccacacggcawcctcacatttggaagc

SEQ ID NO: 5150 - DNA, 33 bp, Homo sapiens
tgaacgattatgaccarctcagggaggcgagaa

SEQ ID NO: 5151 - DNA, 33 bp, Homo sapiens
tgagatatccacacgaraaaactttataatgtg

SEQ ID NO: 5152 - DNA, 33 bp, Homo sapiens
tgagctatatgaatgawctacaagtcaggagag

SEQ ID NO: 5153 - DNA, 33 bp, Homo sapiens
tgatcatagctgaaaayaaaaaatccaacaaaa

SEQ ID NO: 5154 - DNA, 33 bp, Homo sapiens
tgatgtcttggatccarctgaaaataagtatgt

SEQ ID NO: 5155 - DNA, 33 bp, Homo sapiens
tgatgttataccaaatsagaatatcaagttact

SEQ ID NO: 5156 - DNA, 33 bp, Homo sapiens
tgcacagataagtaccygaaaagaggtgtggcc

SEQ ID NO: 5157 - DNA, 33 bp, Homo sapiens
tgcacagtaggaccackcaatgttcacagctca

SEQ ID NO: 5158 - DNA, 33 bp, Homo sapiens
tgcactgaagtggtgcsatgtgaaacctctagg

SEQ ID NO: 5159 - DNA, 33 bp, Homo sapiens
tgctatggtatgcatcwcctagctatgaaatgg

SEQ ID NO: 5160 - DNA, 33 bp, Homo sapiens
tgcttaagttgacagayggaacacattttaagg

SEQ ID NO: 5161 - DNA, 33 bp, Homo sapiens
tggagccttttccaaaygtggtaggatatagaa

SEQ ID NO: 5162 - DNA, 33 bp, Homo sapiens
tggagtcttcataaaargaatttgtcatgagcg

SEQ ID NO: 5163 - DNA, 33 bp, Homo sapiens
tggatcatggagccaasagagtggactaagaag

SEQ ID NO: 5164 - DNA, 33 bp, Homo sapiens
tggtaaggaacttggakgccattctaaacctga

SEQ ID NO: 5165 - DNA, 33 bp, Homo sapiens
tggtcaattcaggttasggagaagaaacaagtc

SEQ ID NO: 5166 - DNA, 33 bp, Homo sapiens
tggtcatccattttccrattccccattcatttg

SEQ ID NO: 5167 - DNA, 33 bp, Homo sapiens
tggttttttgatccacraaatatctcattcaaa

SEQ ID NO: 5168 - DNA, 33 bp, Homo sapiens
tgtacaaaaacttcaayggccagatagatggat

SEQ ID NO: 5169 - DNA, 33 bp, Homo sapiens
tgtatccttgggtggaraaatttaggtactaga

SEQ ID NO: 5170 - DNA, 33 bp, Homo sapiens
tgtcctctagaagaacsctgagcttgcatggag

SEQ ID NO: 5171 - DNA, 33 bp, Homo sapiens
tgtgacctgggacaaaytattcaattgcaacta

SEQ ID NO: 5172 - DNA, 33 bp, Homo sapiens
tgtgctggatcttcacyaagcatttgttaaact

SEQ ID NO: 5173 - DNA, 33 bp, Homo sapiens
tgtgtgatttgcataayaaggcagtaccttaaa

SEQ ID NO: 5174 - DNA, 33 bp, Homo sapiens
tgtgttggggcacagaratgagtagtacatagt

SEQ ID NO: 5175 - DNA, 33 bp, Homo sapiens
tgtgttgttggtatgcrgaacccttgcccaaag

SEQ ID NO: 5176 - DNA, 33 bp, Homo sapiens
tgttcacactgtgtatyaagtctttttgcctaa

SEQ ID NO: 5177 - DNA, 33 bp, Homo sapiens
tgttcactcaacattcratgtgtgtttattgag

SEQ ID NO: 5178 - DNA, 33 bp, Homo sapiens
tgttggaagttcagtcracatttgtacagtgga

SEQ ID NO: 5179 - DNA, 33 bp, Homo sapiens
tgtttccaatcttatcsatattccatcttctca

SEQ ID NO: 5180 - DNA, 33 bp, Homo sapiens
tgtttgactggctagcwctgctccagaaagcac

SEQ ID NO: 5181 - DNA, 33 bp, Homo sapiens
ttaacaatactatccaycttttgtgaaaagcat

SEQ ID NO: 5182 - DNA, 33 bp, Homo sapiens
ttaaggcttacctgagragatcactctgactgt

SEQ ID NO: 5183 - DNA, 33 bp, Homo sapiens
ttacagcaatgaagcayatcaatgaagcatatc

SEQ ID NO: 5184 - DNA, 33 bp, Homo sapiens
ttactgcatcatatagwagttgtattttcagtt

SEQ ID NO: 5185 - DNA, 33 bp, Homo sapiens
ttatttaatgtgctcarcttttaatgcactagt

SEQ ID NO: 5186 - DNA, 33 bp, Homo sapiens
ttatttgcttattgaartagtgaaccttgtttt

SEQ ID NO: 5187 - DNA, 33 bp, Homo sapiens
ttcaaatttaataatcygagaaagcgctgtgta

SEQ ID NO: 5188 - DNA, 33 bp, Homo sapiens
ttcatagtggacgctgragcctttagagtggag

SEQ ID NO: 5189 - DNA, 33 bp, Homo sapiens
ttcatgtttaaatcaaytgggcacttgaacagg

SEQ ID NO: 5190 - DNA, 33 bp, Homo sapiens
ttcattaactatgtcasagagcaatttgaggct

SEQ ID NO: 5191 - DNA, 33 bp, Homo sapiens
ttcattttttccctgasatggtttgacttaggt

SEQ ID NO: 5192 - DNA, 33 bp, Homo sapiens
ttcccatgaggactaayaaacttgtgtggggaa

SEQ ID NO: 5193 - DNA, 33 bp, Homo sapiens
ttccgtttgtgggtcartatcccttcccccaag

SEQ ID NO: 5194 - DNA, 33 bp, Homo sapiens
ttctaattccacatgaycttggctggttagaga

SEQ ID NO: 5195 - DNA, 33 bp, Homo sapiens
ttctgatattcttcaamacaaactgttcaatag

SEQ ID NO: 5196 - DNA, 33 bp, Homo sapiens
ttgaattgtatcccccygccaccaaatttatat

SEQ ID NO: 5197 - DNA, 33 bp, Homo sapiens
ttgataagtccctgacmcatagatggtgatcgg

SEQ ID NO: 5198 - DNA, 33 bp, Homo sapiens
ttgcatacaccatccartcatgtacacagtagt

SEQ ID NO: 5199 - DNA, 33 bp, Homo sapiens
ttgcccaaactatccaygatcacaatgttctat

SEQ ID NO: 5200 - DNA, 33 bp, Homo sapiens
ttggactgatgtacaaytctcatctctataatg

SEQ ID NO: 5201 - DNA, 33 bp, Homo sapiens
ttggagaggcaagttarggatatgtctgtactc

SEQ ID NO: 5202 - DNA, 33 bp, Homo sapiens
ttggagtcaaacttacmaaagggctatttattt

SEQ ID NO: 5203 - DNA, 33 bp, Homo sapiens
ttgggaaagtagaattraaggatggactttgac

SEQ ID NO: 5204 - DNA, 33 bp, Homo sapiens
ttgggaagaaattcacraccttttagtcaatgt

SEQ ID NO: 5205 - DNA, 33 bp, Homo sapiens
ttgtgcatcactaagaycgtttttgactttaaa

SEQ ID NO: 5206 - DNA, 33 bp, Homo sapiens
tttacaaatatacttcraagtgaaaaggttgca

SEQ ID NO: 5207 - DNA, 33 bp, Homo sapiens
tttattctttgcacaarttcaaatgtgattttt

SEQ ID NO: 5208 - DNA, 33 bp, Homo sapiens
tttcatttaacatctaygaaacttgagcaaaag

SEQ ID NO: 5209 - DNA, 33 bp, Homo sapiens
tttctgtattgtttcarctgtgtaactgggttt

SEQ ID NO: 5210 - DNA, 33 bp, Homo sapiens
tttcttgctgtggttayaaaatggttgtgtttc

SEQ ID NO: 5211 - DNA, 33 bp, Homo sapiens
tttgcctattgcctccraattacatagaccctg

SEQ ID NO: 5212 - DNA, 33 bp, Homo sapiens
ttttagacatcacctckacttagcacagtccac

SEQ ID NO: 5213 - DNA, 33 bp, Homo sapiens
ttttagccaatgagtgragctgagcagccacca

SEQ ID NO: 5214 - DNA, 33 bp, Homo sapiens
ttttcttatcttttcaytatacctgcgaatgtc

SEQ ID NO: 5215 - DNA, 33 bp, Homo sapiens
tttttcacgaatgtaamaagtcatgtctgtaat

SEQ ID NO: 5216 - DNA, 33 bp, Homo sapiens
gctaggattccacttayaacccagaggcacact

SEQ ID NO: 5217 - DNA, 33 bp, Homo sapiens
gaatccttgtagttcastccatcacagtaggag

SEQ ID NO: 5218 - DNA, 33 bp, Homo sapiens
aaatgggagctagacaytgagaacacataaaca

SEQ ID NO: 5219 - DNA, 33 bp, Homo sapiens
gtctctggactgtgaayactttgagaataagaa

SEQ ID NO: 5220 - DNA, 33 bp, Homo sapiens
ttgccaggtggactgaygctgatttccaagatt

SEQ ID NO: 5221 - DNA, 33 bp, Homo sapiens
gccaggcaaacaactckctagcacagttggcaa

SEQ ID NO: 5222 - DNA, 33 bp, Homo sapiens
aaacagacacttcttamaatgaggtatacaagt

SEQ ID NO: 5223 - DNA, 33 bp, Homo sapiens
atgaacataaagatggwaacgatgctgaggact

SEQ ID NO: 5224 - DNA, 33 bp, Homo sapiens
cagcaaattgaaaagaygaagattggaatgaaa

SEQ ID NO: 5225 - DNA, 33 bp, Homo sapiens
tccctcgaaggaaaaarcccattgatgattagg

SEQ ID NO: 5226 - DNA, 33 bp, Homo sapiens
aagaccctttctcttaygttctatgcttcaaat

SEQ ID NO: 5227 - DNA, 33 bp, Homo sapiens
tctaggtctagtcggtraacatcacccattaac

SEQ ID NO: 5228 - DNA, 33 bp, Homo sapiens
cttatgactgcagagaktcccttcgtatcgcat

SEQ ID NO: 5229 - DNA, 33 bp, Homo sapiens
ggattgccatgtgtgaygcaacccttcctagag

SEQ ID NO: 5230 - DNA, 33 bp, Homo sapiens
gagaatgaaataaggcycacagagaacaggagc

SEQ ID NO: 5231 - DNA, 33 bp, Homo sapiens
caggcaaggtctcctcyagctggcacttgtaca

SEQ ID NO: 5232 - DNA, 33 bp, Homo sapiens
cagatctctttgatgayacttaaatgtagatac

SEQ ID NO: 5233 - DNA, 33 bp, Homo sapiens
ttccttttactaagtayaaatgtccagcataca

SEQ ID NO: 5234 - DNA, 33 bp, Homo sapiens
ggtggtattactcagasgaatatggtcagactc

SEQ ID NO: 5235 - DNA, 33 bp, Homo sapiens
aaacttccagaacataygtagagcaggtgcctt

SEQ ID NO: 5236 - DNA, 33 bp, Homo sapiens
gagagagaaatatgaargtttgctggtataaag

SEQ ID NO: 5237 - DNA, 33 bp, Homo sapiens
acaccacataactaaaygaattgttgtctacct

SEQ ID NO: 5238 - DNA, 33 bp, Homo sapiens
agaggttgtcacgttayagttgtatgcttgcat

SEQ ID NO: 5239 - DNA, 33 bp, Homo sapiens
actgtggtaaattatgyattgttgatgaggtaa

SEQ ID NO: 5240 - DNA, 33 bp, Homo sapiens
aatggaagtttctgtarcattcaatctaataca

SEQ ID NO: 5241 - DNA, 33 bp, Homo sapiens
ttatctgtaagatacargtaatccatgctcaaa

SEQ ID NO: 5242 - DNA, 33 bp, Homo sapiens
aaatctatgcacctaaytgacttcacttgctcc

SEQ ID NO: 5243 - DNA, 33 bp, Homo sapiens
catttcacagatgagasgacactgagaagttag

SEQ ID NO: 5244 - DNA, 33 bp, Homo sapiens
ttatgtcctgcatcctmacactataaagcaaga

SEQ ID NO: 5245 - DNA, 33 bp, Homo sapiens
agaagatttaccccgaractagcctggagacct

SEQ ID NO: 5246 - DNA, 33 bp, Homo sapiens
aaggacatttcagtcartgacaggcgacatata

SEQ ID NO: 5247 - DNA, 33 bp, Homo sapiens
gaagcaggagagagtaycagataagtaaaacac

SEQ ID NO: 5248 - DNA, 33 bp, Homo sapiens
cttgttgaagggcataygcgtttgttttcctga

SEQ ID NO: 5249 - DNA, 33 bp, Homo sapiens
tgattcattgtggttayactcaatcatactcta

SEQ ID NO: 5250 - DNA, 33 bp, Homo sapiens
tgactcagggagaaaakgagatggctctatctt

SEQ ID NO: 5251 - DNA, 33 bp, Homo sapiens
ccattattgtatgttayaaacgaggcccaggaa

SEQ ID NO: 5252 - DNA, 33 bp, Homo sapiens
gcaaagaaagtttgaawgcataggtacagcagg

SEQ ID NO: 5253 - DNA, 33 bp, Homo sapiens
gctctcttaagctctcrgaaggcagggaaccca

SEQ ID NO: 5254 - DNA, 33 bp, Homo sapiens
ttgttgaaaatgagcaycctcgctttaccaaag

SEQ ID NO: 5255 - DNA, 33 bp, Homo sapiens
aagcctttcttacctcyaaatgttgctaatagt

SEQ ID NO: 5256 - DNA, 33 bp, Homo sapiens
atgtctgagatttcacyagacctactgaattca

SEQ ID NO: 5257 - DNA, 33 bp, Homo sapiens
cagggctgactcagaaytgaggtagagaaaaag

SEQ ID NO: 5258 - DNA, 33 bp, Homo sapiens
atgggcccaaattgtcrctactcattgtattct

SEQ ID NO: 5259 - DNA, 33 bp, Homo sapiens
aggcacttggcaagtascatctcctttaatctt

SEQ ID NO: 5260 - DNA, 33 bp, Homo sapiens
tcctacaaaaaaatcaygtgaggccaacccctt

SEQ ID NO: 5261 - DNA, 33 bp, Homo sapiens
actacagatcctctagyagaattaacagcgagt

SEQ ID NO: 5262 - DNA, 33 bp, Homo sapiens
ctaagcagaccttgtcrctgaagttcacacact

SEQ ID NO: 5263 - DNA, 33 bp, Homo sapiens
aaacgttctaatgtagsagtgctgattagaaag

SEQ ID NO: 5264 - DNA, 33 bp, Homo sapiens
tagtcaaaaccaattcrcctaatgtctgcttca

SEQ ID NO: 5265 - DNA, 33 bp, Homo sapiens
caagattgaccgtggckcttttcagttaatcca

SEQ ID NO: 5266 - DNA, 33 bp, Homo sapiens
tacttgttagcacctcyaattattttttgaaag

SEQ ID NO: 5267 - DNA, 33 bp, Homo sapiens
ttcaagttgcttgttcratacgctgagctacag

SEQ ID NO: 5268 - DNA, 33 bp, Homo sapiens
aattccctttgtttagyagaagcactatcatca

SEQ ID NO: 5269 - DNA, 33 bp, Homo sapiens
aagagagagtgtgagaycaagtcaaaaatggag

SEQ ID NO: 5270 - DNA, 33 bp, Homo sapiens
ccacttgctcgatcacmggaatgaaaggctggc

SEQ ID NO: 5271 - DNA, 33 bp, Homo sapiens
ttgtgggtggaggagarggaaggacccgaagtt

SEQ ID NO: 5272 - DNA, 33 bp, Homo sapiens
aacttgataagctaatsatctgggcttaccctt

SEQ ID NO: 5273 - DNA, 33 bp, Homo sapiens
ttcagtccttttgtaayaaaaatgcagtctctc

SEQ ID NO: 5274 - DNA, 33 bp, Homo sapiens
tagcaactattcattakcaagaaagcataaaag

SEQ ID NO: 5275 - DNA, 33 bp, Homo sapiens
ggagcctacctgagggmaagagactaggaggag

SEQ ID NO: 5276 - DNA, 33 bp, Homo sapiens
tagaaacatgacctccmagctactgtttatata

SEQ ID NO: 5277 - DNA, 33 bp, Homo sapiens
caccatctgggtgagamacaagtgattagggtg

SEQ ID NO: 5278 - DNA, 33 bp, Homo sapiens
agatcagatgattgtasgcaggaggctttattt

SEQ ID NO: 5279 - DNA, 33 bp, Homo sapiens
gtactgagtgtacataragagatttagggaaaa

SEQ ID NO: 5280 - DNA, 33 bp, Homo sapiens
tagtttatttgggagawaacctcagaaagcaca

SEQ ID NO: 5281 - DNA, 33 bp, Homo sapiens
atggacccgaataactracaatcacgttggagg

SEQ ID NO: 5282 - DNA, 33 bp, Homo sapiens
aaaactgacattcaaaraatctcctgagaaata

SEQ ID NO: 5283 - DNA, 33 bp, Homo sapiens
ccaccataatagtgaamtaaagctttgctcact

SEQ ID NO: 5284 - DNA, 33 bp, Homo sapiens
gggttgaaataaaatasaagtgcagaagaactg

SEQ ID NO: 5285 - DNA, 33 bp, Homo sapiens
gaggggatatgagggamagttatgaaatgttat

SEQ ID NO: 5286 - DNA, 33 bp, Homo sapiens
gaatatccatctctgtraagaaaccgactcagc

SEQ ID NO: 5287 - DNA, 33 bp, Homo sapiens
gaataaataagcagaargatgtacacttacttt

SEQ ID NO: 5288 - DNA, 33 bp, Homo sapiens
ccctctggaatgacaartgtacaaaacttagaa

SEQ ID NO: 5289 - DNA, 33 bp, Homo sapiens
caagtgagttttgatarggactttttactattg

SEQ ID NO: 5290 - DNA, 33 bp, Homo sapiens
ttgatgtcatctgtggmactttgcagcttgatc

SEQ ID NO: 5291 - DNA, 33 bp, Homo sapiens
aaaaccagactcaaackgtttccaagtaacaga

SEQ ID NO: 5292 - DNA, 33 bp, Homo sapiens
aaaaccattggattctraaggtagaggtcaccc

SEQ ID NO: 5293 - DNA, 33 bp, Homo sapiens
aaaagtaggctgactayagtgacttgcttgatt

SEQ ID NO: 5294 - DNA, 33 bp, Homo sapiens
aaaagtttcctacatcrattcttttttcaaaaa

SEQ ID NO: 5295 - DNA, 33 bp, Homo sapiens
aaagactgaagaaaaaygaaaagtgtctgaggg

SEQ ID NO: 5296 - DNA, 33 bp, Homo sapiens
aaaggaaatggcatcartatgtcaaggagatat

SEQ ID NO: 5297 - DNA, 33 bp, Homo sapiens
aaagggcatgaactcgwccttttccatggctgc

SEQ ID NO: 5298 - DNA, 33 bp, Homo sapiens
aaaggtctctggaacayctgttgaagtgaacga

SEQ ID NO: 5299 - DNA, 33 bp, Homo sapiens
aaatactatagtagacrctgtaaacaaaaacgc

SEQ ID NO: 5300 - DNA, 33 bp, Homo sapiens
aaatcactagttgcacratttttcatttgctgg

SEQ ID NO: 5301 - DNA, 33 bp, Homo sapiens
aaatgattaactgcacrctaagagaatacattt

SEQ ID NO: 5302 - DNA, 33 bp, Homo sapiens
aacagcgtctggcaaaygtgtttattgttatcc

SEQ ID NO: 5303 - DNA, 33 bp, Homo sapiens
aacagtggataaagaakggctgctgtattccta

SEQ ID NO: 5304 - DNA, 33 bp, Homo sapiens
aaccaattaggatgaaracatggttagaataat

SEQ ID NO: 5305 - DNA, 33 bp, Homo sapiens
aactgcaaaactttaarcatagtgattctaggt

SEQ ID NO: 5306 - DNA, 33 bp, Homo sapiens
aacttagtgtgggtgcraaatgcaatgcaaatt

SEQ ID NO: 5307 - DNA, 33 bp, Homo sapiens
aacttattttcaaatgyaagtcgaaatgtttaa

SEQ ID NO: 5308 - DNA, 33 bp, Homo sapiens
aagagctggatggctaygctaccccagaggctc

SEQ ID NO: 5309 - DNA, 33 bp, Homo sapiens
aagatggtagacagtayggagctgagaaccaca

SEQ ID NO: 5310 - DNA, 33 bp, Homo sapiens
aaggatgttgaagcacraaagcatgaactcgaa

SEQ ID NO: 5311 - DNA, 33 bp, Homo sapiens
aaggttgttttggaacsaggtgagaaaatacac

SEQ ID NO: 5312 - DNA, 33 bp, Homo sapiens
aataatatgccaaaaaygtttatgactttctta

SEQ ID NO: 5313 - DNA, 33 bp, Homo sapiens
aatagcagttcttaaakgtttgtattatagatc

SEQ ID NO: 5314 - DNA, 33 bp, Homo sapiens
gttatactctaagactraaactcactgagggta

SEQ ID NO: 5315 - DNA, 33 bp, Homo sapiens
aatctcagagtagtgargtaaaaataaactctt

SEQ ID NO: 5316 - DNA, 33 bp, Homo sapiens
aatgccactgctgatcraacagtaagtgaaact

SEQ ID NO: 5317 - DNA, 33 bp, Homo sapiens
aatggaggcaaaggaayggctcttgcttgaggc

SEQ ID NO: 5318 - DNA, 33 bp, Homo sapiens
aattctggggaatggasagaacattgatcttat

SEQ ID NO: 5319 - DNA, 33 bp, Homo sapiens
aattggccacacgctcrcatatgaggtcatcag

SEQ ID NO: 5320 - DNA, 33 bp, Homo sapiens
aattggtttagtctaaytgtgatgtatacactg

SEQ ID NO: 5321 - DNA, 33 bp, Homo sapiens
aatttgctcagccttayacaatttctccaatgt

SEQ ID NO: 5322 - DNA, 33 bp, Homo sapiens
acacacacaagagacamcactcgggcggccagt

SEQ ID NO: 5323 - DNA, 33 bp, Homo sapiens
acagagcaggttgtcartaaaggcaggctgaac

SEQ ID NO: 5324 - DNA, 33 bp, Homo sapiens
acagccttctctgatawgttcttatgcattgac

SEQ ID NO: 5325 - DNA, 33 bp, Homo sapiens
acaggagaaagtatcartagaacaggacatgtt

SEQ ID NO: 5326 - DNA, 33 bp, Homo sapiens
accaacaccgatgagasagccctgccgtctccc

SEQ ID NO: 5327 - DNA, 33 bp, Homo sapiens
accaatggaagtgtccrgagaaaagcatcacct

SEQ ID NO: 5328 - DNA, 33 bp, Homo sapiens
accactctctggaatcrctataagtatgctaat

SEQ ID NO: 5329 - DNA, 33 bp, Homo sapiens
attcatgtacagcatayggtatttttgcatggg

SEQ ID NO: 5330 - DNA, 33 bp, Homo sapiens
actactttggattcccyctattgtctgtaatca

SEQ ID NO: 5331 - DNA, 33 bp, Homo sapiens
actctagttcttgaccyctcctattgaagtgcc

SEQ ID NO: 5332 - DNA, 33 bp, Homo sapiens
actgcttagaccttatraaataggctgagggtc

SEQ ID NO: 5333 - DNA, 33 bp, Homo sapiens
acttaccatgggccagrctctattctaagcatg

SEQ ID NO: 5334 - DNA, 33 bp, Homo sapiens
acttccttcaaaagcargtttaagagaataagg

SEQ ID NO: 5335 - DNA, 33 bp, Homo sapiens
acttgctagacatgtgratagtatggcatagct

SEQ ID NO: 5336 - DNA, 33 bp, Homo sapiens
agaaaatgtgcttttasaatgtatggacaaaat

SEQ ID NO: 5337 - DNA, 33 bp, Homo sapiens
agaaaggatttggagakctatttatggcaatcg

SEQ ID NO: 5338 - DNA, 33 bp, Homo sapiens
agaagggatgctccaaraagtgtagattttcct

SEQ ID NO: 5339 - DNA, 33 bp, Homo sapiens
agaatgctattgcaaaygtaagtgacaactcag

SEQ ID NO: 5340 - DNA, 33 bp, Homo sapiens
agaccaacaagaggaargtctgttggaaggtgt

SEQ ID NO: 5341 - DNA, 33 bp, Homo sapiens
agacttaagttgtaacraagccaagttcttgcc

SEQ ID NO: 5342 - DNA, 33 bp, Homo sapiens
agagaggtagacagaasagatcacagaacaatc

SEQ ID NO: 5343 - DNA, 33 bp, Homo sapiens
agatatgcctgcaagaycaaatccttaaaaggg

SEQ ID NO: 5344 - DNA, 33 bp, Homo sapiens
agatgtacacacaaaayggattttcaggatgaa

SEQ ID NO: 5345 - DNA, 33 bp, Homo sapiens
agcactttttttgttakccatcacatggttaag

SEQ ID NO: 5346 - DNA, 33 bp, Homo sapiens
agcagggggacctcaaygtatattagttaccat

SEQ ID NO: 5347 - DNA, 33 bp, Homo sapiens
agcatccactaacagayattctaactccaccgg

SEQ ID NO: 5348 - DNA, 33 bp, Homo sapiens
agccatacacttaccawacaaccagatttgatg

SEQ ID NO: 5349 - DNA, 33 bp, Homo sapiens
agccatcattgaggaasagtaatttttgccagc

SEQ ID NO: 5350 - DNA, 33 bp, Homo sapiens
agcctgcgggtagacayagattggaactgtact

SEQ ID NO: 5351 - DNA, 33 bp, Homo sapiens
agccttgtccgtaataygtgggaccctggtctg

SEQ ID NO: 5352 - DNA, 33 bp, Homo sapiens
aggaaatccaagtcacyaatatgtggtatgtgg

SEQ ID NO: 5353 - DNA, 33 bp, Homo sapiens
agggaactggccattaygaccagtggatagagt

SEQ ID NO: 5354 - DNA, 33 bp, Homo sapiens
agggcttgaacatgcartcctatagtgtgccca

SEQ ID NO: 5355 - DNA, 33 bp, Homo sapiens
aggtgtaggaaacaccragcacttccaaggtca

SEQ ID NO: 5356 - DNA, 33 bp, Homo sapiens
aggttcagggattttcmagggtcctggttccca

SEQ ID NO: 5357 - DNA, 33 bp, Homo sapiens
agtagtaatcaataacyccagaattcagagact

SEQ ID NO: 5358 - DNA, 33 bp, Homo sapiens
agtatactgctatcctyaaattttcaggcctct

SEQ ID NO: 5359 - DNA, 33 bp, Homo sapiens
agtatttccttaatagrcatatagacagcccta

SEQ ID NO: 5360 - DNA, 33 bp, Homo sapiens
agtcaaattgagcacaraggaaggcacgcatct

SEQ ID NO: 5361 - DNA, 33 bp, Homo sapiens
agtctccgataaaatckcagagaactgtttggg

SEQ ID NO: 5362 - DNA, 33 bp, Homo sapiens
agtgttccatgaataasactgttcgggtctaag

SEQ ID NO: 5363 - DNA, 33 bp, Homo sapiens
agtttcctgtgaaaatsagacctcgaccgtgca

SEQ ID NO: 5364 - DNA, 33 bp, Homo sapiens
ataaaagaaatggaaarggatgtcagggtgttc

SEQ ID NO: 5365 - DNA, 33 bp, Homo sapiens
ataaagtacagcattawctacagactgtgtgga

SEQ ID NO: 5366 - DNA, 33 bp, Homo sapiens
ctttactacatagtcawctgtgaattctttctt

SEQ ID NO: 5367 - DNA, 33 bp, Homo sapiens
atacatttcacattcartctaattctggtcagc

SEQ ID NO: 5368 - DNA, 33 bp, Homo sapiens
ataccgcatccagagargtcgcagagccacagc

SEQ ID NO: 5369 - DNA, 33 bp, Homo sapiens
atacctatggttaagayggtgcttggtagaggg

SEQ ID NO: 5370 - DNA, 33 bp, Homo sapiens
atataaatggacatgakaataagccaaccttta

SEQ ID NO: 5371 - DNA, 33 bp, Homo sapiens
atataaggatgagtaamagttattccttgccct

SEQ ID NO: 5372 - DNA, 33 bp, Homo sapiens
atatcaaatagaagaaraacaagtcactctcca

SEQ ID NO: 5373 - DNA, 33 bp, Homo sapiens
atattcactgctgtacycgcatggacttagcac

SEQ ID NO: 5374 - DNA, 33 bp, Homo sapiens
atatttcatccattcawtctgttcagtcagttc

SEQ ID NO: 5375 - DNA, 33 bp, Homo sapiens
atcaattctggtaaccygagcagcaggagaaag

SEQ ID NO: 5376 - DNA, 33 bp, Homo sapiens
atccaggtacaacctcracttaggatgctagtg

SEQ ID NO: 5377 - DNA, 33 bp, Homo sapiens
atccatccattttaacwatctacaggtaatgaa

SEQ ID NO: 5378 - DNA, 33 bp, Homo sapiens
atcccatgttttttccygatagagcactttcag

SEQ ID NO: 5379 - DNA, 33 bp, Homo sapiens
atctttggagatagtaraagtttctgctaaggt

SEQ ID NO: 5380 - DNA, 33 bp, Homo sapiens
atgaaaacaaacaagayggttacagattgctaa

SEQ ID NO: 5381 - DNA, 33 bp, Homo sapiens
atgacacagagcctcaraatatgtaattttaac

SEQ ID NO: 5382 - DNA, 33 bp, Homo sapiens
atggaggtaacttctaygagtattctcaaggcc

SEQ ID NO: 5383 - DNA, 33 bp, Homo sapiens
atgggcagaattggcasagttaaagagaaccac

SEQ ID NO: 5384 - DNA, 33 bp, Homo sapiens
atgggtttctccaaagsctgctttagcttcctt

SEQ ID NO: 5385 - DNA, 33 bp, Homo sapiens
atgtaatggatatatamagccaggtgcaagcca

SEQ ID NO: 5386 - DNA, 33 bp, Homo sapiens
atgtactcaacctcctwaaccaccaagtctagc

SEQ ID NO: 5387 - DNA, 33 bp, Homo sapiens
atgttctatttcatcasactcagataataggta

SEQ ID NO: 5388 - DNA, 33 bp, Homo sapiens
attattgcctggcatcraaaatatgggggaagg

SEQ ID NO: 5389 - DNA, 33 bp, Homo sapiens
attcacagtcccagaaragagagaactgattgg

SEQ ID NO: 5390 - DNA, 33 bp, Homo sapiens
attcactgaacaaatayctactgagaatctacc

SEQ ID NO: 5391 - DNA, 33 bp, Homo sapiens
attctgttttaatatgscaggttttatgaaaac

SEQ ID NO: 5392 - DNA, 33 bp, Homo sapiens
atttaattttcacaacrgcacatgagatactgt

SEQ ID NO: 5393 - DNA, 33 bp, Homo sapiens
atttattttcaggcccrgaacaaatttgactgg

SEQ ID NO: 5394 - DNA, 33 bp, Homo sapiens
atttgaaaatgggagasaagtagaagccagtag

SEQ ID NO: 5395 - DNA, 33 bp, Homo sapiens
atttgtttacctttccrcacattgccagctgta

SEQ ID NO: 5396 - DNA, 33 bp, Homo sapiens
caaagattcagaaaacratgcttgagagaaatg

SEQ ID NO: 5397 - DNA, 33 bp, Homo sapiens
caacaacgtcagaaaaygcctgctaaaacctac

SEQ ID NO: 5398 - DNA, 33 bp, Homo sapiens
aagggaatgcataaacracttctaccaatgtca

SEQ ID NO: 5399 - DNA, 33 bp, Homo sapiens
caactctactccaagamaagcaaatagttgtat

SEQ ID NO: 5400 - DNA, 33 bp, Homo sapiens
caactgttcacctacaragatttctggggcctg

SEQ ID NO: 5401 - DNA, 33 bp, Homo sapiens
caagagagagtttacayagtttctgtcgtagca

SEQ ID NO: 5402 - DNA, 33 bp, Homo sapiens
caagggaaatcagcaarattgtatagtctctca

SEQ ID NO: 5403 - DNA, 33 bp, Homo sapiens
caagtttcctgattaaracaaagcctagccatt

SEQ ID NO: 5404 - DNA, 33 bp, Homo sapiens
caatctctgttctcaarggatttatactaaggt

SEQ ID NO: 5405 - DNA, 33 bp, Homo sapiens
cacaaagatgggattcrgaaattgtcaagatat

SEQ ID NO: 5406 - DNA, 33 bp, Homo sapiens
cacacccctagtttaastggcaaaatctgtcct

SEQ ID NO: 5407 - DNA, 33 bp, Homo sapiens
cacaggcagctgtagayaggacactctgctttc

SEQ ID NO: 5408 - DNA, 33 bp, Homo sapiens
cacatttttattgacartgcctaacatgctgcc

SEQ ID NO: 5409 - DNA, 33 bp, Homo sapiens
caccaatagctgatcargtatggccactcagtc

SEQ ID NO: 5410 - DNA, 33 bp, Homo sapiens
cagacatgaggcaaatkatgtcaatcctatcat

SEQ ID NO: 5411 - DNA, 33 bp, Homo sapiens
cagaggacctgcctttraaaagcctatttgtct

SEQ ID NO: 5412 - DNA, 33 bp, Homo sapiens
cagagtagcagaaaacygtaattcgtgagaata

SEQ ID NO: 5413 - DNA, 33 bp, Homo sapiens
cagatccaagtaaaccrcactacatgctcatgt

SEQ ID NO: 5414 - DNA, 33 bp, Homo sapiens
cagatctattctgataycctgatgaaagctaca

SEQ ID NO: 5415 - DNA, 33 bp, Homo sapiens
cagcaggtcttgttacygatcttgatgccattg

SEQ ID NO: 5416 - DNA, 33 bp, Homo sapiens
cagcggcgctaacagcratgaccaattagagct

SEQ ID NO: 5417 - DNA, 33 bp, Homo sapiens
caggaaaggcttactgmagtcaggtgtcgcaat

SEQ ID NO: 5418 - DNA, 33 bp, Homo sapiens
caggtgtagacaatcaygtaacaaccaatcctg

SEQ ID NO: 5419 - DNA, 33 bp, Homo sapiens
cagtaaagtttaatcaytaggcaactatttatt

SEQ ID NO: 5420 - DNA, 33 bp, Homo sapiens
cagtaggtactttacaratgcacttaacagata

SEQ ID NO: 5421 - DNA, 33 bp, Homo sapiens
cagtcttaccccaccaytggtaaaatgaaatga

SEQ ID NO: 5422 - DNA, 33 bp, Homo sapiens
cataccaaatcaacccwcagtttcacaggaata

SEQ ID NO: 5423 - DNA, 33 bp, Homo sapiens
cataccaccaacattcrcataaactgcttggaa

SEQ ID NO: 5424 - DNA, 33 bp, Homo sapiens
catagatagcattatcrgaattgtgaacccatt

SEQ ID NO: 5425 - DNA, 33 bp, Homo sapiens
cataggcccaacttcayggtgaaggccaagaca

SEQ ID NO: 5426 - DNA, 33 bp, Homo sapiens
catccctcctatctggyaacaggaatatttggg

SEQ ID NO: 5427 - DNA, 33 bp, Homo sapiens
catgaaacttcgtctcraataatttaccatttt

SEQ ID NO: 5428 - DNA, 33 bp, Homo sapiens
catgcaggagcaagtaraagaacatggcaagca

SEQ ID NO: 5429 - DNA, 33 bp, Homo sapiens
catggctcttctacaaycttcccattccttcct

SEQ ID NO: 5430 - DNA, 33 bp, Homo sapiens
catggttcccatgctgwagttcagattgtcaaa

SEQ ID NO: 5431 - DNA, 33 bp, Homo sapiens
cattaatacccaggaartgactcaaaccacagt

SEQ ID NO: 5432 - DNA, 33 bp, Homo sapiens
cattgcaacacagaatragaagtgacaagacag

SEQ ID NO: 5433 - DNA, 33 bp, Homo sapiens
catttcttgtctctaargtgaaaaattgaaaat

SEQ ID NO: 5434 - DNA, 33 bp, Homo sapiens
catttggatgtctcaaygactgactctttatgc

SEQ ID NO: 5435 - DNA, 33 bp, Homo sapiens
ccaagcattttctggcygataaaaagactctgt

SEQ ID NO: 5436 - DNA, 33 bp, Homo sapiens
ccaatgagaaacagtcraggtgatatgtgtggc

SEQ ID NO: 5437 - DNA, 33 bp, Homo sapiens
ccaatgcacttggaaaytcactcaatctcagct

SEQ ID NO: 5438 - DNA, 33 bp, Homo sapiens
gtgtgattatctgtgasgttagtagcatctaca

SEQ ID NO: 5439 - DNA, 33 bp, Homo sapiens
cccagtcactgtatgargttagcaaaaccttgg

SEQ ID NO: 5440 - DNA, 33 bp, Homo sapiens
ccccagtgaggagggayggtcatttctgtgata

SEQ ID NO: 5441 - DNA, 33 bp, Homo sapiens
cccccaacatgaaagcracgccagcaattggag

SEQ ID NO: 5442 - DNA, 33 bp, Homo sapiens
cccctctgatgttgcartatgcctacagaggaa

SEQ ID NO: 5443 - DNA, 33 bp, Homo sapiens
ccgcaagacacccgctsaacagacacgtgtgca

SEQ ID NO: 5444 - DNA, 33 bp, Homo sapiens
ccggatgctcatcctayatgttgacttctgact

SEQ ID NO: 5445 - DNA, 33 bp, Homo sapiens
cctagacattgtctccratctaactctgccttt

SEQ ID NO: 5446 - DNA, 33 bp, Homo sapiens
cctagcctatctgtccrgccagtcgaacctcat

SEQ ID NO: 5447 - DNA, 33 bp, Homo sapiens
cctattattattggacyacttggcaagtgcgag

SEQ ID NO: 5448 - DNA, 33 bp, Homo sapiens
cctcagaaatgtgaacrgtagagatgatttttc

SEQ ID NO: 5449 - DNA, 33 bp, Homo sapiens
cctcccattgtctacaytatcaaaaatagcagc

SEQ ID NO: 5450 - DNA, 33 bp, Homo sapiens
cctgaatgtcctgttcsattttcattggtttta

SEQ ID NO: 5451 - DNA, 33 bp, Homo sapiens
ccttctctaggatataygtcacctatggatcca

SEQ ID NO: 5452 - DNA, 33 bp, Homo sapiens
ccttgacatttgtactyaaatcactctctagaa

SEQ ID NO: 5453 - DNA, 33 bp, Homo sapiens
ccttgtttcttgataasagaagtttagttctgc

SEQ ID NO: 5454 - DNA, 33 bp, Homo sapiens
cctttggagaccagaasagcattgacagccccc

SEQ ID NO: 5455 - DNA, 33 bp, Homo sapiens
cgagcttggttttggayggtattacggactgaa

SEQ ID NO: 5456 - DNA, 33 bp, Homo sapiens
cgatcgggtacttatgsaaattctcaggatatc

SEQ ID NO: 5457 - DNA, 33 bp, Homo sapiens
cgcctctcgatgtttaygattaaaggaacaaat

SEQ ID NO: 5458 - DNA, 33 bp, Homo sapiens
cggaggctgccgtaccrctctagctacttttct

SEQ ID NO: 5459 - DNA, 33 bp, Homo sapiens
cgtgcaataaatgcaamccttatctgttttcta

SEQ ID NO: 5460 - DNA, 33 bp, Homo sapiens
gacttctggtttggtakaggctgaagcgctcct

SEQ ID NO: 5461 - DNA, 33 bp, Homo sapiens
ctaaaagagtaaattcraaagttggctctctcc

SEQ ID NO: 5462 - DNA, 33 bp, Homo sapiens
ctacagtccagcatacrgaaggcattaagaaac

SEQ ID NO: 5463 - DNA, 33 bp, Homo sapiens
ctagcgactgttagtayggcaaaaatctcttat

SEQ ID NO: 5464 - DNA, 33 bp, Homo sapiens
ctagggtattgtaggargaaaatgcagcagcca

SEQ ID NO: 5465 - DNA, 33 bp, Homo sapiens
ctatagaagaacaccartgaatacccatatgtg

SEQ ID NO: 5466 - DNA, 33 bp, Homo sapiens
ctcaaagaactcacagrcaagtattgaagtcag

SEQ ID NO: 5467 - DNA, 33 bp, Homo sapiens
ctcaagtaagcatctcyaaaagacaaatgaggc

SEQ ID NO: 5468 - DNA, 33 bp, Homo sapiens
ctcactcttttgactayattctgatgccctaag

SEQ ID NO: 5469 - DNA, 33 bp, Homo sapiens
ctcagcacagttcttaygttggttgaagtgtca

SEQ ID NO: 5470 - DNA, 33 bp, Homo sapiens
ctgaactaaagcaatascaggaagatctgagtt

SEQ ID NO: 5471 - DNA, 33 bp, Homo sapiens
ctgacactagggtgacsggaaattgtatacggg

SEQ ID NO: 5472 - DNA, 33 bp, Homo sapiens
ctgagggatagcactawaacagtaccaaaatga

SEQ ID NO: 5473 - DNA, 33 bp, Homo sapiens
ctgatattgtaatcaargtgagcctaaggcaac

SEQ ID NO: 5474 - DNA, 33 bp, Homo sapiens
ctgatgcaggttcttayatggtctgaagttatt

SEQ ID NO: 5475 - DNA, 33 bp, Homo sapiens
ctgcaaattcaatgggsaaaattgttgaaataa

SEQ ID NO: 5476 - DNA, 33 bp, Homo sapiens
ctgcttcataaaaacascttaaatatatacttg

SEQ ID NO: 5477 - DNA, 33 bp, Homo sapiens
ctggacattgtttataygaagaactgtttggac

SEQ ID NO: 5478 - DNA, 33 bp, Homo sapiens
ctggagactgcctaaaytgattgagttctgggg

SEQ ID NO: 5479 - DNA, 33 bp, Homo sapiens
ctggatgccctaattckacataagcagaggtat

SEQ ID NO: 5480 - DNA, 33 bp, Homo sapiens
ctggtcaaaagcgaaawcttttcttgccactta

SEQ ID NO: 5481 - DNA, 33 bp, Homo sapiens
ctggtctaaaggagccracacttaatgactccg

SEQ ID NO: 5482 - DNA, 33 bp, Homo sapiens
ctgtgcctgaagtgccyaacattgtgctctgta

SEQ ID NO: 5483 - DNA, 33 bp, Homo sapiens
ctgtggcattaagtcaragtgactccttcaaag

SEQ ID NO: 5484 - DNA, 33 bp, Homo sapiens
cttcaaagtttctctcrcactgaactatattct

SEQ ID NO: 5485 - DNA, 33 bp, Homo sapiens
cttcctgtcttcctacwctctcttgcaccaaat

SEQ ID NO: 5486 - DNA, 33 bp, Homo sapiens
cttgcattaataatcasaggcgagactgcagca

SEQ ID NO: 5487 - DNA, 33 bp, Homo sapiens
cttgcttagacattacrggttatgctttgagat

SEQ ID NO: 5488 - DNA, 33 bp, Homo sapiens
ctttacctctgtaacamctaccagttcttcagg

SEQ ID NO: 5489 - DNA, 33 bp, Homo sapiens
ctttctccctcacttcscatttgaactgcagtc

SEQ ID NO: 5490 - DNA, 33 bp, Homo sapiens
ctttctctgaatctgargacaaaatgtgaaacc

SEQ ID NO: 5491 - DNA, 33 bp, Homo sapiens
gaaaactctagcaaaaraggatgagtataggta

SEQ ID NO: 5492 - DNA, 33 bp, Homo sapiens
gaaaagagcccgtttcrcaggtgcaggtgtttg

SEQ ID NO: 5493 - DNA, 33 bp, Homo sapiens
gaaacaggtatagagaraaacatctgaacaaac

SEQ ID NO: 5494 - DNA, 33 bp, Homo sapiens
gaactctaagatgtgcratcaagtaggatcacc

SEQ ID NO: 5495 - DNA, 33 bp, Homo sapiens
gaactgcaacagattcrataggatgttattata

SEQ ID NO: 5496 - DNA, 33 bp, Homo sapiens
gaagactgggcaacaargatttgagtactaaga

SEQ ID NO: 5497 - DNA, 33 bp, Homo sapiens
gaagccgttgatacaaycttgatgttataacct

SEQ ID NO: 5498 - DNA, 33 bp, Homo sapiens
gaataacaatcgctaaygatcctcaagtgcatg

SEQ ID NO: 5499 - DNA, 33 bp, Homo sapiens
gaatattgtttagctaygaaaaacacaaaagtc

SEQ ID NO: 5500 - DNA, 33 bp, Homo sapiens
gacaaatgcctctgacraaaggactcttgaact

SEQ ID NO: 5501 - DNA, 33 bp, Homo sapiens
gacattataaatgcagsctccttccattttcag

SEQ ID NO: 5502 - DNA, 33 bp, Homo sapiens
gactaagaagccacgaraaaggcatgaaggaaa

SEQ ID NO: 5503 - DNA, 33 bp, Homo sapiens
gactgaagaactgtcayggaatgggagagactg

SEQ ID NO: 5504 - DNA, 33 bp, Homo sapiens
gacttaaatatgtaaarttctccaccaggactg

SEQ ID NO: 5505 - DNA, 33 bp, Homo sapiens
gagaaagggaattcagmatcacactcagttgaa

SEQ ID NO: 5506 - DNA, 33 bp, Homo sapiens
gaggacaaagactctayctgtggattctagcat

SEQ ID NO: 5507 - DNA, 33 bp, Homo sapiens
gaggcatagaattaaayagttggttaggagcaa

SEQ ID NO: 5508 - DNA, 33 bp, Homo sapiens
gagtataccactgggcraaaacacgcaatgtgg

SEQ ID NO: 5509 - DNA, 33 bp, Homo sapiens
gagtcatggagatagtraatacttagtgcagtg

SEQ ID NO: 5510 - DNA, 33 bp, Homo sapiens
gataagtcatctagcamgtaaggctatcaatta

SEQ ID NO: 5511 - DNA, 33 bp, Homo sapiens
gataattatttaacagragctacatattgtcag

SEQ ID NO: 5512 - DNA, 33 bp, Homo sapiens
gatagctagaaaccaakaattaatcagaaagtt

SEQ ID NO: 5513 - DNA, 33 bp, Homo sapiens
gatccacagaaaatcaytgatggctgatgattt

SEQ ID NO: 5514 - DNA, 33 bp, Homo sapiens
gatgacttagcttaaayggatgttgtagttatt

SEQ ID NO: 5515 - DNA, 33 bp, Homo sapiens
gatgctggttggctggratctgaaaccacaacc

SEQ ID NO: 5516 - DNA, 33 bp, Homo sapiens
gatgctgtgaattatcyccttgatgtcagtgaa

SEQ ID NO: 5517 - DNA, 33 bp, Homo sapiens
gatggtatgtatgtcayggagtcccgctgggca

SEQ ID NO: 5518 - DNA, 33 bp, Homo sapiens
gatgttaatgccaacasaaggttgcagtttccc

SEQ ID NO: 5519 - DNA, 33 bp, Homo sapiens
gcaagaaatgtctctcscttatccaacatacct

SEQ ID NO: 5520 - DNA, 33 bp, Homo sapiens
gcaagtattctgactgycagaaggaagtcaatc

SEQ ID NO: 5521 - DNA, 33 bp, Homo sapiens
gcacactagatttgtgyatagaaaactttcaga

SEQ ID NO: 5522 - DNA, 33 bp, Homo sapiens
gcctcatattggaagcrgatgccatctaagagt

SEQ ID NO: 5523 - DNA, 33 bp, Homo sapiens
tcaatttttccatgaargagttcctggtgtaat

SEQ ID NO: 5524 - DNA, 33 bp, Homo sapiens
gctaattatactcgaamctgcttgaacaatttc

SEQ ID NO: 5525 - DNA, 33 bp, Homo sapiens
gctcatggatcttttgkagaattggatgaaagt

SEQ ID NO: 5526 - DNA, 33 bp, Homo sapiens
gctggaaaatccttacyatgactgtagtgtgtt

SEQ ID NO: 5527 - DNA, 33 bp, Homo sapiens
ggagcgtactgattcgratgaccaagaacacac

SEQ ID NO: 5528 - DNA, 33 bp, Homo sapiens
ggagctcttttgtgcartgactaaatgggggaa

SEQ ID NO: 5529 - DNA, 33 bp, Homo sapiens
ggagttgaaagaccaaygaatgacttggacaag

SEQ ID NO: 5530 - DNA, 33 bp, Homo sapiens
ggtatgcttcctatacrcagtcttccttacctt

SEQ ID NO: 5531 - DNA, 33 bp, Homo sapiens
ggtggaattacatccaratctgctatcctggtt

SEQ ID NO: 5532 - DNA, 33 bp, Homo sapiens
gtaattatagtcactayatttgaagttggtgcc

SEQ ID NO: 5533 - DNA, 33 bp, Homo sapiens
gtcaaaaagatgtcacyggggaaaataactgca

SEQ ID NO: 5534 - DNA, 33 bp, Homo sapiens
gtcacctgaacagccaygattacaggcgcatac

SEQ ID NO: 5535 - DNA, 33 bp, Homo sapiens
gttaaatgtcaatccawatattttgcttacctt

SEQ ID NO: 5536 - DNA, 33 bp, Homo sapiens
gttaggatctgcatcaygtgaggcaatattgtc

SEQ ID NO: 5537 - DNA, 33 bp, Homo sapiens
tagctacccaataaaayaggccatattatgcct

SEQ ID NO: 5538 - DNA, 33 bp, Homo sapiens
tatcagtccaggatcargaaccacactacctgg

SEQ ID NO: 5539 - DNA, 33 bp, Homo sapiens
tatcataacaaaaagamcatgagttaccatttt

SEQ ID NO: 5540 - DNA, 33 bp, Homo sapiens
tcatagagaatggtgaygattatgaaaagcagc

SEQ ID NO: 5541 - DNA, 33 bp, Homo sapiens
tggaatatggactcacrgagtttttaacaacat

SEQ ID NO: 5542 - DNA, 33 bp, Homo sapiens
tggcctttaaatagtawcagaagcaaactttac

SEQ ID NO: 5543 - DNA, 33 bp, Homo sapiens
tgtcaaatgttgcagaktcacttttaagatgtc

SEQ ID NO: 5544 - DNA, 33 bp, Homo sapiens
tgttctgtatttccaartaaggcaaaaatttac

SEQ ID NO: 5545 - DNA, 33 bp, Homo sapiens
ttcccagtccatataamagttgtatggacacta

SEQ ID NO: 5546 - DNA, 33 bp, Homo sapiens
ttgaaactaattatcayctgacggttcatttct

SEQ ID NO: 5547 - DNA, 33 bp, Homo sapiens
tttgctcccgtgcctgsaaatgttactcaagga

SEQ ID NO: 5548 - DNA, 33 bp, Homo sapiens
tactgaccataaatcakccaaggtttagtgaac

SEQ ID NO: 5549 - DNA, 33 bp, Homo sapiens
catcttacaagctgcaragggatgtggcagcaa

SEQ ID NO: 5550 - DNA, 33 bp, Homo sapiens
ctctttggccaatccakgaaataaggtgagcac

SEQ ID NO: 5551 - DNA, 33 bp, Homo sapiens
atcatcccacactcaaytcagaggaaatcagac

SEQ ID NO: 5552 - DNA, 33 bp, Homo sapiens
caattcagaggaaatcmgaccttattctccctt

SEQ ID NO: 5553 - DNA, 33 bp, Homo sapiens
cactttcctaatctcargaacaaagtgtaatct

SEQ ID NO: 5554 - DNA, 33 bp, Homo sapiens
ttgagtcattatcagamgttttaaaagatcaac

SEQ ID NO: 5555 - DNA, 33 bp, Homo sapiens
cctgtaattttatcacygacggctagctttcta

SEQ ID NO: 5556 - DNA, 33 bp, Homo sapiens
accctccactcttttcwatcacttgtcacattt

SEQ ID NO: 5557 - DNA, 33 bp, Homo sapiens
gccaaaaaacagatagkatgaaatgtagctttt

SEQ ID NO: 5558 - DNA, 33 bp, Homo sapiens
acaggtgttgaatggaygacggaatgaatgact

SEQ ID NO: 5559 - DNA, 33 bp, Homo sapiens
aggatatacacagagarcacaaacgtcctataa

SEQ ID NO: 5560 - DNA, 33 bp, Homo sapiens
tactgttccaactaccraggacactattactga

SEQ ID NO: 5561 - DNA, 33 bp, Homo sapiens
aaagtgtcccatttacraaagaactgttttctt

SEQ ID NO: 5562 - DNA, 33 bp, Homo sapiens
aagcattatcacatcaytgaaaactacaataaa

SEQ ID NO: 5563 - DNA, 33 bp, Homo sapiens
aattgtttatggaagawcaaatggtccagaaga

SEQ ID NO: 5564 - DNA, 33 bp, Homo sapiens
tcatgcttgcttgtacygaaatgcttgtattag

SEQ ID NO: 5565 - DNA, 33 bp, Homo sapiens
atacactgctttcaacyaaaacattattagcat

SEQ ID NO: 5566 - DNA, 33 bp, Homo sapiens
agattattgaagtaacygaggagattcatgtga

SEQ ID NO: 5567 - DNA, 33 bp, Homo sapiens
aggagtaccaaccttaygttgctaacactgaga

SEQ ID NO: 5568 - DNA, 33 bp, Homo sapiens
aggtgggtcagattctmaataactttgagtact

SEQ ID NO: 5569 - DNA, 33 bp, Homo sapiens
atagaggaggtgggtarataagaggcgatagtg

SEQ ID NO: 5570 - DNA, 33 bp, Homo sapiens
atctttgtagctttaaygtagagtggagaagaa

SEQ ID NO: 5571 - DNA, 33 bp, Homo sapiens
atgacctttcttttgargacatctttacggttg

SEQ ID NO: 5572 - DNA, 33 bp, Homo sapiens
caataaagggaaggaaygcaattttgtgagaat

SEQ ID NO: 5573 - DNA, 33 bp, Homo sapiens
cacctacctcccagccrcgttctcttccttcag

SEQ ID NO: 5574 - DNA, 33 bp, Homo sapiens
cacttcaaccaaaacakctatacttatttctgt

SEQ ID NO: 5575 - DNA, 33 bp, Homo sapiens
cacttccatcagcctaratcttgaaaactgaag

SEQ ID NO: 5576 - DNA, 33 bp, Homo sapiens
caggcaagagtttactyacaggctaacgcggat

SEQ ID NO: 5577 - DNA, 33 bp, Homo sapiens
cataataggggacatgraagcatgatacctaat

SEQ ID NO: 5578 - DNA, 33 bp, Homo sapiens
catgtgcttaggtcaargaactagttttaaaaa

SEQ ID NO: 5579 - DNA, 33 bp, Homo sapiens
ccaatgaaaattattayacattcggaagagtat

SEQ ID NO: 5580 - DNA, 33 bp, Homo sapiens
cccaggaagatggagakaattggtacaagtgga

SEQ ID NO: 5581 - DNA, 33 bp, Homo sapiens
ctaaacagaaaaattgmaatgtaggaaaaatgc

SEQ ID NO: 5582 - DNA, 33 bp, Homo sapiens
ctgatcaactcatgagkcctaagatcagttcag

SEQ ID NO: 5583 - DNA, 33 bp, Homo sapiens
ctgttgttacactacasgttagccaaagcaaag

SEQ ID NO: 5584 - DNA, 33 bp, Homo sapiens
cttttatgttttataaygtgacacaaagtagtc

SEQ ID NO: 5585 - DNA, 33 bp, Homo sapiens
gaacccagggaattcaygtgactggtttaagat

SEQ ID NO: 5586 - DNA, 33 bp, Homo sapiens
ggcattaggcagctgcygcagaaatacaggtaa

SEQ ID NO: 5587 - DNA, 33 bp, Homo sapiens
ggtctggtgtaaggtcyagagcttgccatcaag

SEQ ID NO: 5588 - DNA, 33 bp, Homo sapiens
gtgttcatcatgtaacygccatttttaaaccaa

SEQ ID NO: 5589 - DNA, 33 bp, Homo sapiens
gttgcaggcccaattayacttgaacagagggta

SEQ ID NO: 5590 - DNA, 33 bp, Homo sapiens
ccaggttgacattcacwaattgacaaatgttat

SEQ ID NO: 5591 - DNA, 33 bp, Homo sapiens
taatcgcttttaaaggycccaactcaatactgt

SEQ ID NO: 5592 - DNA, 33 bp, Homo sapiens
tactcctctcattcaargataaattctatgccc

SEQ ID NO: 5593 - DNA, 33 bp, Homo sapiens
tagtaacattgaattgraaaggaagtgaggtga

SEQ ID NO: 5594 - DNA, 33 bp, Homo sapiens
ttatactgcattaatgkaaggacaaaaagtgaa

SEQ ID NO: 5595 - DNA, 33 bp, Homo sapiens
ttctgtagaacgcctcsacttcctcccagacga

SEQ ID NO: 5596 - DNA, 33 bp, Homo sapiens
ttcttcatttctttgakgcacagaagaacccat

SEQ ID NO: 5597 - DNA, 33 bp, Homo sapiens
ttgggtacagtcccacrgatggttattactgtc

SEQ ID NO: 5598 - DNA, 33 bp, Homo sapiens
aaaggcattctctacaratttccaatcaaggaa

SEQ ID NO: 5599 - DNA, 33 bp, Homo sapiens
aattttagataaacacygaacaatatttcaaca

SEQ ID NO: 5600 - DNA, 33 bp, Homo sapiens
cagattcagcatctaayatgtgtttcttaagcc

SEQ ID NO: 5601 - DNA, 33 bp, Homo sapiens
catagaactatacagcmattcaagtaaatattt

SEQ ID NO: 5602 - DNA, 33 bp, Homo sapiens
ctgtattttagatgtcractttaagtaagactt

SEQ ID NO: 5603 - DNA, 33 bp, Homo sapiens
acacttagttagaaaasgtgagctttctagttt

SEQ ID NO: 5604 - DNA, 33 bp, Homo sapiens
aatactgaattgtttargagaggaagaattttc

SEQ ID NO: 5605 - DNA, 33 bp, Homo sapiens
ctgtctccagcagttasggttcattcttaggtt

SEQ ID NO: 5606 - DNA, 33 bp, Homo sapiens
gcgtcctagaacaaaayggcaggagaggctggg

SEQ ID NO: 5607 - DNA, 33 bp, Homo sapiens
aaaggagagactaagaygtagtaaagcagtggg

SEQ ID NO: 5608 - DNA, 33 bp, Homo sapiens
aacgaataatacttgcraactcatctagatttt

SEQ ID NO: 5609 - DNA, 33 bp, Homo sapiens
aataagctcagtgttaraaatgctgagtttgat

SEQ ID NO: 5610 - DNA, 33 bp, Homo sapiens
aatgtgaaaatgaaaastctctttgtctgtgct

SEQ ID NO: 5611 - DNA, 33 bp, Homo sapiens
acaaagtgggacaggcrctcaaggcaggaacat

SEQ ID NO: 5612 - DNA, 33 bp, Homo sapiens
acaactttatctaccaygtttgctcaaactcag

SEQ ID NO: 5613 - DNA, 33 bp, Homo sapiens
acatgctcttgagaaayagaagaatgatctgct

SEQ ID NO: 5614 - DNA, 33 bp, Homo sapiens
agaaggagacatgcagsagtagagagacaataa

SEQ ID NO: 5615 - DNA, 33 bp, Homo sapiens
agactgttttctttccyatgactattcattcca

SEQ ID NO: 5616 - DNA, 33 bp, Homo sapiens
agcaggtgcctccaaargtcttactaagccaca

SEQ ID NO: 5617 - DNA, 33 bp, Homo sapiens
agcatagcccagaaaawaatttttgctctacaa

SEQ ID NO: 5618 - DNA, 33 bp, Homo sapiens
aggaagtagaggagaaycattctgccaggctaa

SEQ ID NO: 5619 - DNA, 33 bp, Homo sapiens
agggaaagtagaagacrgggaagtcgaaagaga

SEQ ID NO: 5620 - DNA, 33 bp, Homo sapiens
aggtacatcatctgctyaatgcaccacaggtac

SEQ ID NO: 5621 - DNA, 33 bp, Homo sapiens
aggttttttggtcctgmaactggacacactata

SEQ ID NO: 5622 - DNA, 33 bp, Homo sapiens
taccaaaacctgcatcygaaataacttctaaga

SEQ ID NO: 5623 - DNA, 33 bp, Homo sapiens
attcagtgagttaaaaygggaagatatttttca

SEQ ID NO: 5624 - DNA, 33 bp, Homo sapiens
caataggtagtttttcyctcgctcttctggtag

SEQ ID NO: 5625 - DNA, 33 bp, Homo sapiens
cagagatatgactctaygctgagatcgctaaga

SEQ ID NO: 5626 - DNA, 33 bp, Homo sapiens
cagccatcctgggaaamgaataatacttgcgaa

SEQ ID NO: 5627 - DNA, 33 bp, Homo sapiens
cagctaagactcctaayataaaagaattgccaa

SEQ ID NO: 5628 - DNA, 33 bp, Homo sapiens
caggtttcctgatagtraaacagaaaccagagt

SEQ ID NO: 5629 - DNA, 33 bp, Homo sapiens
cataatgaagacgccaragggcatagcagggaa

SEQ ID NO: 5630 - DNA, 33 bp, Homo sapiens
ccactgcaggaaacagrcaaaccagagagatta

SEQ ID NO: 5631 - DNA, 33 bp, Homo sapiens
cccagagcaatgccacrataaaaataggaacca

SEQ ID NO: 5632 - DNA, 33 bp, Homo sapiens
cccatcctagcttcccwcattcatctcacactg

SEQ ID NO: 5633 - DNA, 33 bp, Homo sapiens
cctcttctctctctggyagaatcctatatcgca

SEQ ID NO: 5634 - DNA, 33 bp, Homo sapiens
cctgctgatccaaacayggctgttgctctgcca

SEQ ID NO: 5635 - DNA, 33 bp, Homo sapiens
ctcagcatgaaaatcayagaaaacatctgaatt

SEQ ID NO: 5636 - DNA, 33 bp, Homo sapiens
ctccataaccctccccsacattcttaatacata

SEQ ID NO: 5637 - DNA, 33 bp, Homo sapiens
ctcccagtccagtatgyatcccacctaactcag

SEQ ID NO: 5638 - DNA, 33 bp, Homo sapiens
ctctgttggctgagtayagtagctcatgcttgt

SEQ ID NO: 5639 - DNA, 33 bp, Homo sapiens
ctgtctacaggctgaamtgtaaaacctttccaa

SEQ ID NO: 5640 - DNA, 33 bp, Homo sapiens
gaacaaaaacaggctamagagaaggatttccta

SEQ ID NO: 5641 - DNA, 33 bp, Homo sapiens
gatactggttttgcacrcataggctgagggagt

SEQ ID NO: 5642 - DNA, 33 bp, Homo sapiens
gcatgactacgtcccartacaactttatgtatg

SEQ ID NO: 5643 - DNA, 33 bp, Homo sapiens
gcatgtggccccaaacrcttcattctagagcaa

SEQ ID NO: 5644 - DNA, 33 bp, Homo sapiens
ggacagaagtcagaatwaaatgatttcctcaag

SEQ ID NO: 5645 - DNA, 33 bp, Homo sapiens
ttattgtgtcactgcaragagttccataattaa

SEQ ID NO: 5646 - DNA, 33 bp, Homo sapiens
aatctttctgtctctcraaataattctcaaaca

SEQ ID NO: 5647 - DNA, 33 bp, Homo sapiens
ggatattctaatggcaktcgatggctcttaggc

SEQ ID NO: 5648 - DNA, 33 bp, Homo sapiens
ggatgctctgacttgcrcaatttcaatacatag

SEQ ID NO: 5649 - DNA, 33 bp, Homo sapiens
ggattacgggatagccyataacaaacaggggtc

SEQ ID NO: 5650 - DNA, 33 bp, Homo sapiens
ggattatttgtctgaargcaaggtaacaagatc

SEQ ID NO: 5651 - DNA, 33 bp, Homo sapiens
ggattttcttgtcgaamtgcgaaggcctgcgct

SEQ ID NO: 5652 - DNA, 33 bp, Homo sapiens
ggcaaactagtggagcwattacttaatttcccc

SEQ ID NO: 5653 - DNA, 33 bp, Homo sapiens
ggcaacccaaagatgakgtaaattgctcctgct

SEQ ID NO: 5654 - DNA, 33 bp, Homo sapiens
ggcaatatctcaagtaygtttgacaccatgctg

SEQ ID NO: 5655 - DNA, 33 bp, Homo sapiens
ggcacctgtgtacgtcratgactgaccacccca

SEQ ID NO: 5656 - DNA, 33 bp, Homo sapiens
ggcagcaatagaaaacsaacacaggcctgggta

SEQ ID NO: 5657 - DNA, 33 bp, Homo sapiens
ggcagcatgggtatcargacagcaagacactgc

SEQ ID NO: 5658 - DNA, 33 bp, Homo sapiens
aggtcttttggttttgwaaccaggacattggca

SEQ ID NO: 5659 - DNA, 33 bp, Homo sapiens
ggcaggcaatggccgckagaaggtcagttttgt

SEQ ID NO: 5660 - DNA, 33 bp, Homo sapiens
ggcatcagctacttaaytgcacaggaaaaatct

SEQ ID NO: 5661 - DNA, 33 bp, Homo sapiens
ggcatgatttagggacmattgccttttccatgg

SEQ ID NO: 5662 - DNA, 33 bp, Homo sapiens
ggccactggaaacgcargcctcagggcagctca

SEQ ID NO: 5663 - DNA, 33 bp, Homo sapiens
ggcccacaggcacgtascgaaaagcccacttgt

SEQ ID NO: 5664 - DNA, 33 bp, Homo sapiens
ggcggcctggattgaaygccctgcccaggtctc

SEQ ID NO: 5665 - DNA, 33 bp, Homo sapiens
ggctcactgtaaaacaygaacagatggccaagg

SEQ ID NO: 5666 - DNA, 33 bp, Homo sapiens
ggctctcttagataaaygaaagcatctttttaa

SEQ ID NO: 5667 - DNA, 33 bp, Homo sapiens
ggctctgtccttatacygaatacggcaacacat

SEQ ID NO: 5668 - DNA, 33 bp, Homo sapiens
ggctgggaaccaaaggkaaagaaaccatgataa

SEQ ID NO: 5669 - DNA, 33 bp, Homo sapiens
ggctgtgaccaaaaaargatagcacagggaacc

SEQ ID NO: 5670 - DNA, 33 bp, Homo sapiens
ggcttacaacttgtacyctccacagcagcagcc

SEQ ID NO: 5671 - DNA, 33 bp, Homo sapiens
tctcttaatactgaaartcacaaaataggataa

SEQ ID NO: 5672 - DNA, 33 bp, Homo sapiens
ggctttccatgtggaaytgcaccaaatccttac

SEQ ID NO: 5673 - DNA, 33 bp, Homo sapiens
gggaaaatgcttgtcaraaacagatcatcatct

SEQ ID NO: 5674 - DNA, 33 bp, Homo sapiens
gggaagactgcttatayggctctggaatcaata

SEQ ID NO: 5675 - DNA, 33 bp, Homo sapiens
gggaagccaggtcatakaaggctatgtgtactg

SEQ ID NO: 5676 - DNA, 33 bp, Homo sapiens
gggaaggagctacctamgctgaggatgaagaca

SEQ ID NO: 5677 - DNA, 33 bp, Homo sapiens
gggacacagaacatacraaagtaaacgtggccg

SEQ ID NO: 5678 - DNA, 33 bp, Homo sapiens
gggagctgttctggaaygacataggcctcaact

SEQ ID NO: 5679 - DNA, 33 bp, Homo sapiens
gggaggtggcaacgcasagtgacctagaaaagc

SEQ ID NO: 5680 - DNA, 33 bp, Homo sapiens
gggattaggaaggcccracaaaatacactgaag

SEQ ID NO: 5681 - DNA, 33 bp, Homo sapiens
gggcaaccctcgaccaygaaagcaaggaaataa

SEQ ID NO: 5682 - DNA, 33 bp, Homo sapiens
gggccaccaaatacaayataacaaacttaaaac

SEQ ID NO: 5683 - DNA, 33 bp, Homo sapiens
gggccaccaggtcaaargatgcaaaccccgcac

SEQ ID NO: 5684 - DNA, 33 bp, Homo sapiens
ggggagcggtcatagayatggcttgtccagagt

SEQ ID NO: 5685 - DNA, 33 bp, Homo sapiens
ggggctcaaatgctgcygagagtcttcttcctc

SEQ ID NO: 5686 - DNA, 33 bp, Homo sapiens
gggtagtgtaggacaarcagtggagtgcatggg

SEQ ID NO: 5687 - DNA, 33 bp, Homo sapiens
gggtccatcatggtaargctgagacatgacaga

SEQ ID NO: 5688 - DNA, 33 bp, Homo sapiens
gggtcctttccagtacyaaccgccttaggctgg

SEQ ID NO: 5689 - DNA, 33 bp, Homo sapiens
gggtgccttcactggamataattcagagccacc

SEQ ID NO: 5690 - DNA, 33 bp, Homo sapiens
gggtgtcagttattccraagaactcacacataa

SEQ ID NO: 5691 - DNA, 33 bp, Homo sapiens
ggtacctcagagaaacygtatgaaatagtcatt

SEQ ID NO: 5692 - DNA, 33 bp, Homo sapiens
ggtagaattgattgcaragttgcttcatattct

SEQ ID NO: 5693 - DNA, 33 bp, Homo sapiens
ggtagacgggcaccccragatgtaccaaccttt

SEQ ID NO: 5694 - DNA, 33 bp, Homo sapiens
ggtagataagtagtagyaaaacttttgttagat

SEQ ID NO: 5695 - DNA, 33 bp, Homo sapiens
ggtagcctggtacatakagtgcatttagggcat

SEQ ID NO: 5696 - DNA, 33 bp, Homo sapiens
ggtaggttagaaaaaawtattgtcattgttcag

SEQ ID NO: 5697 - DNA, 33 bp, Homo sapiens
ggtataaacttctccartccttaagaattagcc

SEQ ID NO: 5698 - DNA, 33 bp, Homo sapiens
ggtcaccctatccctaraccatatgctgtcttg

SEQ ID NO: 5699 - DNA, 33 bp, Homo sapiens
aagcagggaaatccaartcactactgagaacaa

SEQ ID NO: 5700 - DNA, 33 bp, Homo sapiens
ggtccttgatgtgatayaattagtgtctttaaa

SEQ ID NO: 5701 - DNA, 33 bp, Homo sapiens
ggtcgggagcgtggaarattctagacacagccc

SEQ ID NO: 5702 - DNA, 33 bp, Homo sapiens
ggtgattgcaagtaaayaacatgatatcaacca

SEQ ID NO: 5703 - DNA, 33 bp, Homo sapiens
ggtttttctatgtcgtmacaataatgatctctt

SEQ ID NO: 5704 - DNA, 33 bp, Homo sapiens
gtaaaacagattgctamtacccagtgttgctgg

SEQ ID NO: 5705 - DNA, 33 bp, Homo sapiens
gtaaaagcaccaaaaargcctgataaatgaatg

SEQ ID NO: 5706 - DNA, 33 bp, Homo sapiens
gtaaagtctacctgaayagtcatgtatggcccc

SEQ ID NO: 5707 - DNA, 33 bp, Homo sapiens
gtaaattctgatacaascaagttttcctcctct

SEQ ID NO: 5708 - DNA, 33 bp, Homo sapiens
gtaaggcgtacaaataygaacaactccaccaag

SEQ ID NO: 5709 - DNA, 33 bp, Homo sapiens
gtaagtgcttgtcaaasgaagaaatgaataaat

SEQ ID NO: 5710 - DNA, 33 bp, Homo sapiens
gtaatactccttctacratcctaagatgggtct

SEQ ID NO: 5711 - DNA, 33 bp, Homo sapiens
gtaatctgtaggtaaamcatacttgtcacactg

SEQ ID NO: 5712 - DNA, 33 bp, Homo sapiens
gtacaacttgattaaargcgggcaaaagctctg

SEQ ID NO: 5713 - DNA, 33 bp, Homo sapiens
gtaggggttcaggactyacattagaaatccctg

SEQ ID NO: 5714 - DNA, 33 bp, Homo sapiens
gtataaatggaagaacsagattcacaaggaaaa

SEQ ID NO: 5715 - DNA, 33 bp, Homo sapiens
gtatatatgcgagagcrcttttaatttgctccc

SEQ ID NO: 5716 - DNA, 33 bp, Homo sapiens
gtatctccattgcttgyatctggtattgttatc

SEQ ID NO: 5717 - DNA, 33 bp, Homo sapiens
gtatctgttggaaaaamaattctaagtggcaaa

SEQ ID NO: 5718 - DNA, 33 bp, Homo sapiens
aattttacgaacagctraaaatcctcactttga

SEQ ID NO: 5719 - DNA, 33 bp, Homo sapiens
gtatggggatgggtcarctgaagtctggtggag

SEQ ID NO: 5720 - DNA, 33 bp, Homo sapiens
gtatgtcctggccaggmaggaagctcttagttc

SEQ ID NO: 5721 - DNA, 33 bp, Homo sapiens
gtattctgcttcttacyaaaaccaggatcataa

SEQ ID NO: 5722 - DNA, 33 bp, Homo sapiens
gtcaattagtccattaygtatgacacaggctga

SEQ ID NO: 5723 - DNA, 33 bp, Homo sapiens
gtcagaccagctcccartagatctgcgaaaggc

SEQ ID NO: 5724 - DNA, 33 bp, Homo sapiens
gtcagtgcttactttakaaggacactgcttagc

SEQ ID NO: 5725 - DNA, 33 bp, Homo sapiens
gtccacaattaggtcaygtccagaatccaaaag

SEQ ID NO: 5726 - DNA, 33 bp, Homo sapiens
gtcctgccaccaacgasaagcaagtgaatgagg

SEQ ID NO: 5727 - DNA, 33 bp, Homo sapiens
gtctcctcaaagcaaamtgcagcaatttctcaa

SEQ ID NO: 5728 - DNA, 33 bp, Homo sapiens
gtctctctgttaaaaawttccaagtagtcatta

SEQ ID NO: 5729 - DNA, 33 bp, Homo sapiens
gtctctgttttttagckctcttctcgaatggtt

SEQ ID NO: 5730 - DNA, 33 bp, Homo sapiens
gtctgttatttgctcawctcatactgtaagatc

SEQ ID NO: 5731 - DNA, 33 bp, Homo sapiens
gtctgttttgctgcacragttctggatacaatt

SEQ ID NO: 5732 - DNA, 33 bp, Homo sapiens
gtcttcacacctggcargaacgcgaccaccgcc

SEQ ID NO: 5733 - DNA, 33 bp, Homo sapiens
gtcttccagcctgcaaygtgtggtacttgaact

SEQ ID NO: 5734 - DNA, 33 bp, Homo sapiens
gtcttgatgcttcataygcattatcttaatact

SEQ ID NO: 5735 - DNA, 33 bp, Homo sapiens
gtcttgctggcttaaawaagaacgctgccatat

SEQ ID NO: 5736 - DNA, 33 bp, Homo sapiens
gtctttgtatcacttcrcactcttatttcatga

SEQ ID NO: 5737 - DNA, 33 bp, Homo sapiens
gtgaagattgtgcactyacaaactaggtgatag

SEQ ID NO: 5738 - DNA, 33 bp, Homo sapiens
gtgactgctgttaatayataagtcactttgtgg

SEQ ID NO: 5739 - DNA, 33 bp, Homo sapiens
gtgagtagaatgtctakcattttgtctggtttt

SEQ ID NO: 5740 - DNA, 33 bp, Homo sapiens
gtgagtgttagagcacrgagtcagctggaaagg

SEQ ID NO: 5741 - DNA, 33 bp, Homo sapiens
gtgataataatagctarcttgatgcatttatca

SEQ ID NO: 5742 - DNA, 33 bp, Homo sapiens
gtgatataggagtatargaaggatgacagattt

SEQ ID NO: 5743 - DNA, 33 bp, Homo sapiens
gtgatatgtgctggtcsaaaccagaaatccaag

SEQ ID NO: 5744 - DNA, 33 bp, Homo sapiens
gtgattctctctctgcraccggggtaagggctc

SEQ ID NO: 5745 - DNA, 33 bp, Homo sapiens
gtgatttaacatgacartatctcatcaacaaaa

SEQ ID NO: 5746 - DNA, 33 bp, Homo sapiens
gtgatttagggaagaartatgtgacagttctgc

SEQ ID NO: 5747 - DNA, 33 bp, Homo sapiens
gtgcaggtcacctcgayggtcaccgcgcgggga

SEQ ID NO: 5748 - DNA, 33 bp, Homo sapiens
gtgccaaactcagcgcraggaaatttgcattaa

SEQ ID NO: 5749 - DNA, 33 bp, Homo sapiens
gtgctggttcaactggrcatgaagtgataagca

SEQ ID NO: 5750 - DNA, 33 bp, Homo sapiens
gtggcctatttctagcyctccactgtgctgaat

SEQ ID NO: 5751 - DNA, 33 bp, Homo sapiens
gtggtaaccattggaamgaaaacactgacataa

SEQ ID NO: 5752 - DNA, 33 bp, Homo sapiens
gtgtctgttgttctcayctgttaagtccatagg

SEQ ID NO: 5753 - DNA, 33 bp, Homo sapiens
gtgtctttggagtgaasctactcagagatgcca

SEQ ID NO: 5754 - DNA, 33 bp, Homo sapiens
gtgtggttaatcccctyaatccagtcaggaact

SEQ ID NO: 5755 - DNA, 33 bp, Homo sapiens
gtgtttctccacaaaayggcctgaagtcccctg

SEQ ID NO: 5756 - DNA, 33 bp, Homo sapiens
gttaaatgttaccatakgaaaatcatcgattga

SEQ ID NO: 5757 - DNA, 33 bp, Homo sapiens
gttaaggataacaagtsaacatcattccctgct

SEQ ID NO: 5758 - DNA, 33 bp, Homo sapiens
gttacactgtgatatayacttgtcagtaccaac

SEQ ID NO: 5759 - DNA, 33 bp, Homo sapiens
gttaccactggacgacractgctacatttctca

SEQ ID NO: 5760 - DNA, 33 bp, Homo sapiens
gttactaagtggtagartaacctaagtcatgca

SEQ ID NO: 5761 - DNA, 33 bp, Homo sapiens
gttagaacttaagtcasatactcttctctcttc

SEQ ID NO: 5762 - DNA, 33 bp, Homo sapiens
gttagagcctacattcrctattcgtcacctttt

SEQ ID NO: 5763 - DNA, 33 bp, Homo sapiens
gttcaggcaatgaaaaytcagggaagggaccag

SEQ ID NO: 5764 - DNA, 33 bp, Homo sapiens
gttcatttatatgcacrataccacattttgtag

SEQ ID NO: 5765 - DNA, 33 bp, Homo sapiens
gttccagcctaatcacrcagctatactggcagt

SEQ ID NO: 5766 - DNA, 33 bp, Homo sapiens
gttcctacaaagtttcratggaattatgtcaga

SEQ ID NO: 5767 - DNA, 33 bp, Homo sapiens
gttctggctgtagtaaytgtcattagatattat

SEQ ID NO: 5768 - DNA, 33 bp, Homo sapiens
gttcttcaaatctgtargaacaaacaatccaga

SEQ ID NO: 5769 - DNA, 33 bp, Homo sapiens
gttcttgattctttacsaacagtggcctcgtga

SEQ ID NO: 5770 - DNA, 33 bp, Homo sapiens
gttgactcaaatttcgwcaaacacatatacttg

SEQ ID NO: 5771 - DNA, 33 bp, Homo sapiens
gttgcatgactctgaayataccaaaagccactg

SEQ ID NO: 5772 - DNA, 33 bp, Homo sapiens
gttgccaaatgtgttaygttgtgtctcagagag

SEQ ID NO: 5773 - DNA, 33 bp, Homo sapiens
gttggcacagccttatkaggaagataatccaat

SEQ ID NO: 5774 - DNA, 33 bp, Homo sapiens
gttggggacctctgcastaaaccatattcccaa

SEQ ID NO: 5775 - DNA, 33 bp, Homo sapiens
gtttacttttgcaaacrggaaagttcttttggg

SEQ ID NO: 5776 - DNA, 33 bp, Homo sapiens
gtttatttggaatttgratttacctgtatttcc

SEQ ID NO: 5777 - DNA, 33 bp, Homo sapiens
gtttgtagatgtcggcratgagctcgtagcgct

SEQ ID NO: 5778 - DNA, 33 bp, Homo sapiens
gttttcttctctgtgargttatcaatcagcaga

SEQ ID NO: 5779 - DNA, 33 bp, Homo sapiens
aatattacgctattaartcacatacattccact

SEQ ID NO: 5780 - DNA, 33 bp, Homo sapiens
gttttgaaaatgacctwacttggcaaaggaaac

SEQ ID NO: 5781 - DNA, 33 bp, Homo sapiens
gttttgctttttgtaayagtcatcctaatcggt

SEQ ID NO: 5782 - DNA, 33 bp, Homo sapiens
taaaaaagacactgatragaaacactgaaaaag

SEQ ID NO: 5783 - DNA, 33 bp, Homo sapiens
taaaaagtagctagccraggagtgaagcccgag

SEQ ID NO: 5784 - DNA, 33 bp, Homo sapiens
taaaacaaggcacccaytgctgaaaaagagagc

SEQ ID NO: 5785 - DNA, 33 bp, Homo sapiens
taaaatagatttttatsaaatacacaccagaca

SEQ ID NO: 5786 - DNA, 33 bp, Homo sapiens
taaaatccagtcacagwaagttacatattgcat

SEQ ID NO: 5787 - DNA, 33 bp, Homo sapiens
taaagagtccctcctcragttagtccaatttaa

SEQ ID NO: 5788 - DNA, 33 bp, Homo sapiens
taaagatatgtagtagkccccaaaattctactt

SEQ ID NO: 5789 - DNA, 33 bp, Homo sapiens
taaagcagctggataargatttggtatttttaa

SEQ ID NO: 5790 - DNA, 33 bp, Homo sapiens
taaagtacaactggtasataacttctgcccttt

SEQ ID NO: 5791 - DNA, 33 bp, Homo sapiens
taaatgggaggagaaayggtgaaagactaaaag

SEQ ID NO: 5792 - DNA, 33 bp, Homo sapiens
taacaatgccttttcaygcactactgacttgca

SEQ ID NO: 5793 - DNA, 33 bp, Homo sapiens
taacagccaagtcctaytaaagcactattttaa

SEQ ID NO: 5794 - DNA, 33 bp, Homo sapiens
taacatcacactgaggmaccacttgccccaaac

SEQ ID NO: 5795 - DNA, 33 bp, Homo sapiens
taacatgatattttaayggaagcagaaagtcct

SEQ ID NO: 5796 - DNA, 33 bp, Homo sapiens
taagagaaaggaattgragcagatgtgtaaccc

SEQ ID NO: 5797 - DNA, 33 bp, Homo sapiens
taagcgaccaggaaaasattgcgagcttgaaag

SEQ ID NO: 5798 - DNA, 33 bp, Homo sapiens
taagctgatattttagkccctatcagcctgtgt

SEQ ID NO: 5799 - DNA, 33 bp, Homo sapiens
taagcttttaagtacartacactcttctaaaat

SEQ ID NO: 5800 - DNA, 33 bp, Homo sapiens
taagtaacttggctctmaaagaaagctcctgaa

SEQ ID NO: 5801 - DNA, 33 bp, Homo sapiens
taagttccgggatacaygtgaagagcatgcagg

SEQ ID NO: 5802 - DNA, 33 bp, Homo sapiens
taataaaaggaaggagmatgtgtactggagagc

SEQ ID NO: 5803 - DNA, 33 bp, Homo sapiens
aagatctaatgggtagragtgactttgtgtaga

SEQ ID NO: 5804 - DNA, 33 bp, Homo sapiens
taataccaacaactaargtttgcaagcacttaa

SEQ ID NO: 5805 - DNA, 33 bp, Homo sapiens
taatagaccaatgataygtgaggagggaagtag

SEQ ID NO: 5806 - DNA, 33 bp, Homo sapiens
taatgtagctaaaataygtagtgtgacctttga

SEQ ID NO: 5807 - DNA, 33 bp, Homo sapiens
taattaaaaacatggamacagagtcagagtgtg

SEQ ID NO: 5808 - DNA, 33 bp, Homo sapiens
taattattgaattaaaygctttgccaaataagg

SEQ ID NO: 5809 - DNA, 33 bp, Homo sapiens
taattcataggaagackcaggttagtccaaacc

SEQ ID NO: 5810 - DNA, 33 bp, Homo sapiens
taatttatagcaatcgycaatttcaatggtata

SEQ ID NO: 5811 - DNA, 33 bp, Homo sapiens
tacaaagttgttagtamgggcaatctgatccta

SEQ ID NO: 5812 - DNA, 33 bp, Homo sapiens
tacacaaattgcctggmatatagtagtcattgt

SEQ ID NO: 5813 - DNA, 33 bp, Homo sapiens
tacactgactcacctamaactctggcattacaa

SEQ ID NO: 5814 - DNA, 33 bp, Homo sapiens
tacagtggaatgctgarggctaaacgttcagtg

SEQ ID NO: 5815 - DNA, 33 bp, Homo sapiens
taccacaaaaattccaygatgaacccagtacca

SEQ ID NO: 5816 - DNA, 33 bp, Homo sapiens
taccatattgacagtargtatccactaggtagg

SEQ ID NO: 5817 - DNA, 33 bp, Homo sapiens
tacgtcaatacgcataytacaatggttgggcac

SEQ ID NO: 5818 - DNA, 33 bp, Homo sapiens
tactaaatgctccaaayatgcaagaatgtctct

SEQ ID NO: 5819 - DNA, 33 bp, Homo sapiens
tactactcacatccatsagtcttatcagttcat

SEQ ID NO: 5820 - DNA, 33 bp, Homo sapiens
tactctgtcagatacaytactagaagatgggca

SEQ ID NO: 5821 - DNA, 33 bp, Homo sapiens
tactgacaaaatcaggmccacaaggagataaat

SEQ ID NO: 5822 - DNA, 33 bp, Homo sapiens
gtctcagggactgcaamtatgtattcaggtgag

SEQ ID NO: 5823 - DNA, 33 bp, Homo sapiens
tactggaaactggaggraagaccaatcttgtta

SEQ ID NO: 5824 - DNA, 33 bp, Homo sapiens
tacttactctctggaawgacaagatgttctgtg

SEQ ID NO: 5825 - DNA, 33 bp, Homo sapiens
tagaaaccacacaaagmcttacttactcttccc

SEQ ID NO: 5826 - DNA, 33 bp, Homo sapiens
tagaaagctgtaattgsaacaagatttgtcatc

SEQ ID NO: 5827 - DNA, 33 bp, Homo sapiens
tagaactaatccctcayggagaacgtggaacca

SEQ ID NO: 5828 - DNA, 33 bp, Homo sapiens
tagaacttgaagggaamcatggaactaatgatt

SEQ ID NO: 5829 - DNA, 33 bp, Homo sapiens
tagactaaggggacgcygagtattaaacaggtt

SEQ ID NO: 5830 - DNA, 33 bp, Homo sapiens
tagactctttcctagakcctatggaagtaatgc

SEQ ID NO: 5831 - DNA, 33 bp, Homo sapiens
tagactgtagggtctakacttatcctcaagaat

SEQ ID NO: 5832 - DNA, 33 bp, Homo sapiens
tagagccatgcctaagycttagaaaaaaagttc

SEQ ID NO: 5833 - DNA, 33 bp, Homo sapiens
tagagcttcctctttaragattcatagaacggg

SEQ ID NO: 5834 - DNA, 33 bp, Homo sapiens
tagatacccttggaaaytgcaagtgtaagaatg

SEQ ID NO: 5835 - DNA, 33 bp, Homo sapiens
ctccaggttacttcatkgtctcaaatagctatt

SEQ ID NO: 5836 - DNA, 33 bp, Homo sapiens
tagcaaatcataatcayattcaacggacagttc

SEQ ID NO: 5837 - DNA, 33 bp, Homo sapiens
tagcccaatgtggctcygaaggggttaggtgct

SEQ ID NO: 5838 - DNA, 33 bp, Homo sapiens
aaatgttcctcctggaraagctgtattcccttc

SEQ ID NO: 5839 - DNA, 33 bp, Homo sapiens
taggatgggatagaaartgagaggtactattta

SEQ ID NO: 5840 - DNA, 33 bp, Homo sapiens
ccacaccattgtgaccrgaaagagacccaaggc

SEQ ID NO: 5841 - DNA, 33 bp, Homo sapiens
tagggaccagcagaatsactatgtgctagagcg

SEQ ID NO: 5842 - DNA, 33 bp, Homo sapiens
taggggaagaaaggtcyagtagaaggtggtaac

SEQ ID NO: 5843 - DNA, 33 bp, Homo sapiens
tagtaatctacggccargctttcacagctgtgg

SEQ ID NO: 5844 - DNA, 33 bp, Homo sapiens
tagtcatttaggagacmgaaatacaaagacatt

SEQ ID NO: 5845 - DNA, 33 bp, Homo sapiens
tagttgatggttaacartcaagctggagaagaa

SEQ ID NO: 5846 - DNA, 33 bp, Homo sapiens
tataaattgttgatgartaagtatcctgcttgt

SEQ ID NO: 5847 - DNA, 33 bp, Homo sapiens
tataagtgcctaactaygagttttctgaccctt

SEQ ID NO: 5848 - DNA, 33 bp, Homo sapiens
tataagtggcatcacgragtggcaccctgaaca

SEQ ID NO: 5849 - DNA, 33 bp, Homo sapiens
tatacaggaggataacrgggttcatgacaagct

SEQ ID NO: 5850 - DNA, 33 bp, Homo sapiens
tatcatgaagcctaaaygcgatggatatatgtt

SEQ ID NO: 5851 - DNA, 33 bp, Homo sapiens
tatccagttctgaaccrccttgcactgttctgt

SEQ ID NO: 5852 - DNA, 33 bp, Homo sapiens
tatctagtacactcagsacgtcacacaattctt

SEQ ID NO: 5853 - DNA, 33 bp, Homo sapiens
tatctgaacaaagagamcttccctgaccaccct

SEQ ID NO: 5854 - DNA, 33 bp, Homo sapiens
tatctgctaaggcagarcatcacaagtggctgc

SEQ ID NO: 5855 - DNA, 33 bp, Homo sapiens
tatctggaatgtttggracacatgaacacacct

SEQ ID NO: 5856 - DNA, 33 bp, Homo sapiens
tatcttcaactaccaargaaagttcaggaactt

SEQ ID NO: 5857 - DNA, 33 bp, Homo sapiens
tatgaacaaacagaaamtgtcaacagagataga

SEQ ID NO: 5858 - DNA, 33 bp, Homo sapiens
tatgagacacaattccrgaagaggaaaacagct

SEQ ID NO: 5859 - DNA, 33 bp, Homo sapiens
tatgagtagcactacartgaacgtattagtgca

SEQ ID NO: 5860 - DNA, 33 bp, Homo sapiens
tatggagacagaaaccrccctataggaaggagc

SEQ ID NO: 5861 - DNA, 33 bp, Homo sapiens
tatgtaaattggtgctsagaactcagttgtaaa

SEQ ID NO: 5862 - DNA, 33 bp, Homo sapiens
tatgtcttgccagaaamtattaaagacccctca

SEQ ID NO: 5863 - DNA, 33 bp, Homo sapiens
tatgtgtgtatctgtaygtgcaatcacaaaatc

SEQ ID NO: 5864 - DNA, 33 bp, Homo sapiens
tatgttgcgtgaaaaamatactaaacagcatta

SEQ ID NO: 5865 - DNA, 33 bp, Homo sapiens
tattgccaaattgttcragacctaagaagttaa

SEQ ID NO: 5866 - DNA, 33 bp, Homo sapiens
tattgtaaatgtgtaastaagtgaaagacaagc

SEQ ID NO: 5867 - DNA, 33 bp, Homo sapiens
tatttaaagtgcactaygtctgaagtatgaaga

SEQ ID NO: 5868 - DNA, 33 bp, Homo sapiens
tatttattgtgtgcaartaaagaagaatgtaag

SEQ ID NO: 5869 - DNA, 33 bp, Homo sapiens
tatttcaatatgaaagrcaggacttcaatattt

SEQ ID NO: 5870 - DNA, 33 bp, Homo sapiens
tatttctagaggcccaygggtatttacactttt

SEQ ID NO: 5871 - DNA, 33 bp, Homo sapiens
tatttgttgagcatccractttatcataattac

SEQ ID NO: 5872 - DNA, 33 bp, Homo sapiens
tcaaaaggcttatgtawaggagattctacggct

SEQ ID NO: 5873 - DNA, 33 bp, Homo sapiens
tcaacttttctaccaaygattttgcatttatct

SEQ ID NO: 5874 - DNA, 33 bp, Homo sapiens
tcaagactaacagggcygaaatagcaaaacctc

SEQ ID NO: 5875 - DNA, 33 bp, Homo sapiens
tcaagactgactaggargaagagttttagtata

SEQ ID NO: 5876 - DNA, 33 bp, Homo sapiens
tcaagataaaacagacrataatagtctcagtaa

SEQ ID NO: 5877 - DNA, 33 bp, Homo sapiens
tcaagggtctcttctamatgaggaagcaactgt

SEQ ID NO: 5878 - DNA, 33 bp, Homo sapiens
tcaagtgggttcagaaraagtgatttgggttca

SEQ ID NO: 5879 - DNA, 33 bp, Homo sapiens
tcacagagattgatcawtaactgaggatgccaa

SEQ ID NO: 5880 - DNA, 33 bp, Homo sapiens
tcacagataactatatyacatcaatctcctggt

SEQ ID NO: 5881 - DNA, 33 bp, Homo sapiens
tcacagatgctcctacratttgtacttttttcc

SEQ ID NO: 5882 - DNA, 33 bp, Homo sapiens
tcacaggaccaagcacractcttactgtggtta

SEQ ID NO: 5883 - DNA, 33 bp, Homo sapiens
tcacagtttttctaaartcaagttccaattatc

SEQ ID NO: 5884 - DNA, 33 bp, Homo sapiens
tcacccctctttgaaayagtagctttaaattta

SEQ ID NO: 5885 - DNA, 33 bp, Homo sapiens
tcactagttttgtatcrgataaagtatacagta

SEQ ID NO: 5886 - DNA, 33 bp, Homo sapiens
tcagaaagagctacaaygtgactaaaggaggca

SEQ ID NO: 5887 - DNA, 33 bp, Homo sapiens
tcagaaataagagtgtraagttccaggaaattc

SEQ ID NO: 5888 - DNA, 33 bp, Homo sapiens
tcagaacatggtgggamggagacccataagatc

SEQ ID NO: 5889 - DNA, 33 bp, Homo sapiens
tcagcgaggattctaayatagttcatctcaaat

SEQ ID NO: 5890 - DNA, 33 bp, Homo sapiens
tcataactgtgttaccygagtgacatttaattt

SEQ ID NO: 5891 - DNA, 33 bp, Homo sapiens
tcatacatagcactccygagtagattaaagatg

SEQ ID NO: 5892 - DNA, 33 bp, Homo sapiens
tcatagaatttcagtcyaggagaataagcagac

SEQ ID NO: 5893 - DNA, 33 bp, Homo sapiens
tcatgacaaaattagamgggacgcatatctctg

SEQ ID NO: 5894 - DNA, 33 bp, Homo sapiens
tcattcaataggtgagyagataaatgtggccta

SEQ ID NO: 5895 - DNA, 33 bp, Homo sapiens
tcattggttctcaaatyaacgctgtcctcacta

SEQ ID NO: 5896 - DNA, 33 bp, Homo sapiens
tccaaaatgtaatttcyagtagcacacttctag

SEQ ID NO: 5897 - DNA, 33 bp, Homo sapiens
tccaagaaaccatgaaygataacctagacctag

SEQ ID NO: 5898 - DNA, 33 bp, Homo sapiens
tccacaagaatcagtaraatggtgactctcaaa

SEQ ID NO: 5899 - DNA, 33 bp, Homo sapiens
tccacctgcatttaaakcagcacgtgtgttttt

SEQ ID NO: 5900 - DNA, 33 bp, Homo sapiens
tccagatgctgaccaasatgactggtgctgtgt

SEQ ID NO: 5901 - DNA, 33 bp, Homo sapiens
tccagccttggcgatayggccagaccttgtctc

SEQ ID NO: 5902 - DNA, 33 bp, Homo sapiens
tccaggccaaacatatwagagaacataggagaa

SEQ ID NO: 5903 - DNA, 33 bp, Homo sapiens
tccatacatacccaaargcacaagagagtcaaa

SEQ ID NO: 5904 - DNA, 33 bp, Homo sapiens
tccatcaagaaatcagycaatttggttgctggg

SEQ ID NO: 5905 - DNA, 33 bp, Homo sapiens
tccatccttattccaaycctctcatcttctatc

SEQ ID NO: 5906 - DNA, 33 bp, Homo sapiens
tccatctccagtcttayctgtaaatggtaactc

SEQ ID NO: 5907 - DNA, 33 bp, Homo sapiens
tccatgctttttacaaytctggctttatcacat

SEQ ID NO: 5908 - DNA, 33 bp, Homo sapiens
tcccctctctgattcamcacattattcatcacc

SEQ ID NO: 5909 - DNA, 33 bp, Homo sapiens
tccctattcatgagtcwcttaatagccatctcg

SEQ ID NO: 5910 - DNA, 33 bp, Homo sapiens
tccggacaacaaagcastgagtcatatctgaac

SEQ ID NO: 5911 - DNA, 33 bp, Homo sapiens
tcctaagtatttctcamgtcactgtttctgtct

SEQ ID NO: 5912 - DNA, 33 bp, Homo sapiens
tcctattgacagacacygtggttttttcactgt

SEQ ID NO: 5913 - DNA, 33 bp, Homo sapiens
tcctgatgcagtgtcayggctattcagattagg

SEQ ID NO: 5914 - DNA, 33 bp, Homo sapiens
tcctggaaattatgaawtgtctgtagaatgtta

SEQ ID NO: 5915 - DNA, 33 bp, Homo sapiens
tcctgtctcagccagtracagtgaatctggagg

SEQ ID NO: 5916 - DNA, 33 bp, Homo sapiens
tcctttatgttgcagcygcctaccttgcagacc

SEQ ID NO: 5917 - DNA, 33 bp, Homo sapiens
tcgacgtcctgttcgcrgagtttgagctcaggt

SEQ ID NO: 5918 - DNA, 33 bp, Homo sapiens
tcgttgccacaggaatragaaattaacagcaga

SEQ ID NO: 5919 - DNA, 33 bp, Homo sapiens
tctaaactatcattcgyccctcccagctactcc

SEQ ID NO: 5920 - DNA, 33 bp, Homo sapiens
tctacaataaaaccatsaatctcaaatcattgg

SEQ ID NO: 5921 - DNA, 33 bp, Homo sapiens
tctagctctgagagtcraggaacctttctaagc

SEQ ID NO: 5922 - DNA, 33 bp, Homo sapiens
tctaggagagcctagaraatgtataattgttct

SEQ ID NO: 5923 - DNA, 33 bp, Homo sapiens
acgtccactctgatcarccagtgcgattggcac

SEQ ID NO: 5924 - DNA, 33 bp, Homo sapiens
tctatgctttgtgaaamaatctaatactgcaaa

SEQ ID NO: 5925 - DNA, 33 bp, Homo sapiens
tctcaagcatccttgartatcaaaaggagaaga

SEQ ID NO: 5926 - DNA, 33 bp, Homo sapiens
tctcatgcaaccttgaygtgaatcctcagagga

SEQ ID NO: 5927 - DNA, 33 bp, Homo sapiens
tctcctctccagctcckacattgtgctgtaaac

SEQ ID NO: 5928 - DNA, 33 bp, Homo sapiens
tctccttcagttgctckaatcaatcataggttt

SEQ ID NO: 5929 - DNA, 33 bp, Homo sapiens
tctctttggacccggaygtttttacactaatca

SEQ ID NO: 5930 - DNA, 33 bp, Homo sapiens
tctgactcctttctacmaaatgctttctcctac

SEQ ID NO: 5931 - DNA, 33 bp, Homo sapiens
tctgccttcctcttcaygtggtgtcctgtgtgt

SEQ ID NO: 5932 - DNA, 33 bp, Homo sapiens
tctgccttccttgcgcyaatgtttagtttcaga

SEQ ID NO: 5933 - DNA, 33 bp, Homo sapiens
tctgctgaagtgtgaawtgtgaaggcactgccc

SEQ ID NO: 5934 - DNA, 33 bp, Homo sapiens
tctggagcaaatgaaasagtcaaccaaactgta

SEQ ID NO: 5935 - DNA, 33 bp, Homo sapiens
tctgtatttctttgacygtaaactacctttttg

SEQ ID NO: 5936 - DNA, 33 bp, Homo sapiens
tcttacctagcaaaaaygaggcatcatggaagt

SEQ ID NO: 5937 - DNA, 33 bp, Homo sapiens
tcttcaaaacagcttaracacgaatccaaacgg

SEQ ID NO: 5938 - DNA, 33 bp, Homo sapiens
tcttcaggagtcagggyattgattcaccaattc

SEQ ID NO: 5939 - DNA, 33 bp, Homo sapiens
tcttcttcggattagcwagtgtcatgtaactcc

SEQ ID NO: 5940 - DNA, 33 bp, Homo sapiens
gtgacaaccgggaccamatccaactgggcgttg

SEQ ID NO: 5941 - DNA, 33 bp, Homo sapiens
tcttgcccatctggaarctaggaactggcctct

SEQ ID NO: 5942 - DNA, 33 bp, Homo sapiens
tcttgtaacttgcatarcctggaaacgtttctt

SEQ ID NO: 5943 - DNA, 33 bp, Homo sapiens
tctttacaagcacctcragaggagtatgtaggg

SEQ ID NO: 5944 - DNA, 33 bp, Homo sapiens
tcttttcttcacttgcrcctcttcattacttga

SEQ ID NO: 5945 - DNA, 33 bp, Homo sapiens
tcttttggcctcctcawgtattatataggagat

SEQ ID NO: 5946 - DNA, 33 bp, Homo sapiens
tgaaagttacagcttcyattaggtgtttttggt

SEQ ID NO: 5947 - DNA, 33 bp, Homo sapiens
tgaaattatggtaaacrgacctcccaaggagag

SEQ ID NO: 5948 - DNA, 33 bp, Homo sapiens
tgaacaaaacacataaygtaggcagtgtgattc

SEQ ID NO: 5949 - DNA, 33 bp, Homo sapiens
tgaacattcacgtaaastctttggacatatgtt

SEQ ID NO: 5950 - DNA, 33 bp, Homo sapiens
tgaagcctggaagataygctcacgtttttgagg

SEQ ID NO: 5951 - DNA, 33 bp, Homo sapiens
tgaagggtctcctaccygccaggacttggaaca

SEQ ID NO: 5952 - DNA, 33 bp, Homo sapiens
tgaatccgagtgtcacyacttcctagctcagtg

SEQ ID NO: 5953 - DNA, 33 bp, Homo sapiens
tgacatcctcaaacacrgtgaactgaaagcaaa

SEQ ID NO: 5954 - DNA, 33 bp, Homo sapiens
tgacatcttttgtagargtcttcccatctagtc

SEQ ID NO: 5955 - DNA, 33 bp, Homo sapiens
tgacctaccatctgaayacgttaagaaaactaa

SEQ ID NO: 5956 - DNA, 33 bp, Homo sapiens
tgaccttgctgaaggasacgaagcagcttccgg

SEQ ID NO: 5957 - DNA, 33 bp, Homo sapiens
tgagaacactgttgcaytaaaagagattaaaag

SEQ ID NO: 5958 - DNA, 33 bp, Homo sapiens
tgagctaaacgaccagsctacaaagatgcacag

SEQ ID NO: 5959 - DNA, 33 bp, Homo sapiens
tgagtaggcgagtgttraaatatgcaatctagc

SEQ ID NO: 5960 - DNA, 33 bp, Homo sapiens
tgagtttctaaaggagragctaaaaataaagac

SEQ ID NO: 5961 - DNA, 33 bp, Homo sapiens
tgataagcatgcctgawaagatggaaaaaacgg

SEQ ID NO: 5962 - DNA, 33 bp, Homo sapiens
tgatagaatccttaagraactgttaactggttg

SEQ ID NO: 5963 - DNA, 33 bp, Homo sapiens
tgatgattaactgtaaktcatgacattatgcaa

SEQ ID NO: 5964 - DNA, 33 bp, Homo sapiens
tgattaagaatcaaacraggtaaggagagagct

SEQ ID NO: 5965 - DNA, 33 bp, Homo sapiens
tgcaaatgcctgctggratggggcagagaaaga

SEQ ID NO: 5966 - DNA, 33 bp, Homo sapiens
tgcaacagacaaggcaraaaacctttagcagtg

SEQ ID NO: 5967 - DNA, 33 bp, Homo sapiens
tgcaagaataatgagtyacagttggtgattaga

SEQ ID NO: 5968 - DNA, 33 bp, Homo sapiens
tgcaaggcttagagaartgtagtgacttcccca

SEQ ID NO: 5969 - DNA, 33 bp, Homo sapiens
tgcacgtgggtttctamgctaggctcttggctc

SEQ ID NO: 5970 - DNA, 33 bp, Homo sapiens
tgcagcactaattcacwaatacatgataaggca

SEQ ID NO: 5971 - DNA, 33 bp, Homo sapiens
tgcaggaacagaagaakaaacactacaggtcct

SEQ ID NO: 5972 - DNA, 33 bp, Homo sapiens
tgcatctcactcaccayaaccaatggaactaga

SEQ ID NO: 5973 - DNA, 33 bp, Homo sapiens
tgcatgggcaggtcaaygtccccaaatcacgtt

SEQ ID NO: 5974 - DNA, 33 bp, Homo sapiens
tgcctcagtgaaagaawaggttctctgaaagtt

SEQ ID NO: 5975 - DNA, 33 bp, Homo sapiens
tgcgtggcacgtagtcragtgctatgtgggcct

SEQ ID NO: 5976 - DNA, 33 bp, Homo sapiens
tgcgtttctctgctgastaatgacgttgaacgt

SEQ ID NO: 5977 - DNA, 33 bp, Homo sapiens
tgctaaaaagttgcaayaggtgtacatatattt

SEQ ID NO: 5978 - DNA, 33 bp, Homo sapiens
tgctaaaacaccaaaawtgtctctgcttgtaag

SEQ ID NO: 5979 - DNA, 33 bp, Homo sapiens
tgctatggggactctayggtgatatggaatgac

SEQ ID NO: 5980 - DNA, 33 bp, Homo sapiens
tgctctgatgataatasgttgggaattcagcaa

SEQ ID NO: 5981 - DNA, 33 bp, Homo sapiens
tgctctgccacagaaaraacgaagcctcaggcc

SEQ ID NO: 5982 - DNA, 33 bp, Homo sapiens
tgctgaggccaaaccaygacaagggctattttt

SEQ ID NO: 5983 - DNA, 33 bp, Homo sapiens
tgctgggttatatccckccgatcattgtccctc

SEQ ID NO: 5984 - DNA, 33 bp, Homo sapiens
tgctggtgagggtacaragcatcagatattctc

SEQ ID NO: 5985 - DNA, 33 bp, Homo sapiens
tgctgttagtcaagtckcggagcctcaatttct

SEQ ID NO: 5986 - DNA, 33 bp, Homo sapiens
tgcttagcaaactaagrataacagttctatcca

SEQ ID NO: 5987 - DNA, 33 bp, Homo sapiens
tgcttcataactgttaycatccctattttacag

SEQ ID NO: 5988 - DNA, 33 bp, Homo sapiens
tgcttcttccagtgtaycttctgccaatttcaa

SEQ ID NO: 5989 - DNA, 33 bp, Homo sapiens
tgcttgtccatgtagaygtgctttatttatgcc

SEQ ID NO: 5990 - DNA, 33 bp, Homo sapiens
tgctttcattttctgcygagattttaaaggatt

SEQ ID NO: 5991 - DNA, 33 bp, Homo sapiens
tggaaaaagtgttcacrggcttaggatactgac

SEQ ID NO: 5992 - DNA, 33 bp, Homo sapiens
tggaactgtgaaaatasgtttgtgttgttttaa

SEQ ID NO: 5993 - DNA, 33 bp, Homo sapiens
tggaagccaaagggtcrctgatgatttgcgttg

SEQ ID NO: 5994 - DNA, 33 bp, Homo sapiens
tggaagcttgggagggycaatttagttaaacaa

SEQ ID NO: 5995 - DNA, 33 bp, Homo sapiens
tggactagatcccagckccaatctgatttaata

SEQ ID NO: 5996 - DNA, 33 bp, Homo sapiens
tggagaaagcagtaccrgaatgttttagaagca

SEQ ID NO: 5997 - DNA, 33 bp, Homo sapiens
tggagaagtaaaagcargatggaatggaagaga

SEQ ID NO: 5998 - DNA, 33 bp, Homo sapiens
tggagatgttgttgaasagagtcaaactctaaa

SEQ ID NO: 5999 - DNA, 33 bp, Homo sapiens
tggatcaatgtaaatcraccactcctgaaacac

SEQ ID NO: 6000 - DNA, 33 bp, Homo sapiens
tggatggatagattgamaatggccacaatttat

SEQ ID NO: 6001 - DNA, 33 bp, Homo sapiens
tggattaaagggaagawgagagaagctggctcc

SEQ ID NO: 6002 - DNA, 33 bp, Homo sapiens
tggattataccaaccakgccagttagaaatctc

SEQ ID NO: 6003 - DNA, 33 bp, Homo sapiens
tggcaggggagggatayacacaaacttccttat

SEQ ID NO: 6004 - DNA, 33 bp, Homo sapiens
tggcagggggtggcaaygattaagggaactgca

SEQ ID NO: 6005 - DNA, 33 bp, Homo sapiens
tggcccacagagtcacraggccgctgtattagt

SEQ ID NO: 6006 - DNA, 33 bp, Homo sapiens
tggcccattcttaaggycagcaattaagctcca

SEQ ID NO: 6007 - DNA, 33 bp, Homo sapiens
tggccttgcaagcagaragtgagatcccctctc

SEQ ID NO: 6008 - DNA, 33 bp, Homo sapiens
tggcgctttattgcaasaaaggcagttaggggt

SEQ ID NO: 6009 - DNA, 33 bp, Homo sapiens
tgggaagtaagctggaygagagaatgtcagctg

SEQ ID NO: 6010 - DNA, 33 bp, Homo sapiens
tgggagtgatactgtcwcacctaagatcaaaac

SEQ ID NO: 6011 - DNA, 33 bp, Homo sapiens
tgggcaacttaatccaygaatgttgtctgtatt

SEQ ID NO: 6012 - DNA, 33 bp, Homo sapiens
tgggcagaaggtccgakaatgatgaacgatgct

SEQ ID NO: 6013 - DNA, 33 bp, Homo sapiens
tggggcagggtgaacayggctgcttgaagagac

SEQ ID NO: 6014 - DNA, 33 bp, Homo sapiens
tgggtgcctttcaacasattcctctttgatttc

SEQ ID NO: 6015 - DNA, 33 bp, Homo sapiens
tgggtgctccacctggyacgtatatctctgctc

SEQ ID NO: 6016 - DNA, 33 bp, Homo sapiens
tgggtggctaagcctakcaacagacttcctcca

SEQ ID NO: 6017 - DNA, 33 bp, Homo sapiens
tggtagacataagagawaggactggagacttgg

SEQ ID NO: 6018 - DNA, 33 bp, Homo sapiens
tggtatcaaagttttaycttccattgaaatcca

SEQ ID NO: 6019 - DNA, 33 bp, Homo sapiens
tggtatgatctgaattyaagagtcctttctggc

SEQ ID NO: 6020 - DNA, 33 bp, Homo sapiens
tggtatgctgaaagatwaagatagtaaaatgtg

SEQ ID NO: 6021 - DNA, 33 bp, Homo sapiens
tggtcagccattttgasggaactggggcccagg

SEQ ID NO: 6022 - DNA, 33 bp, Homo sapiens
tggtgactttctttgcscctctccactcttaca

SEQ ID NO: 6023 - DNA, 33 bp, Homo sapiens
tggttttactgttgaawattgctggaaacagtg

SEQ ID NO: 6024 - DNA, 33 bp, Homo sapiens
tgtaaagccttttgtayatactgtatgaacaac

SEQ ID NO: 6025 - DNA, 33 bp, Homo sapiens
tgtaacaaaaattgtaygacaaatgcttctaga

SEQ ID NO: 6026 - DNA, 33 bp, Homo sapiens
tgtaggttcccctgtcmatctggcttaatcggg

SEQ ID NO: 6027 - DNA, 33 bp, Homo sapiens
tgtattactggcatgastatttcgggattgtat

SEQ ID NO: 6028 - DNA, 33 bp, Homo sapiens
tgtattattttaatgcratatcgatcagcagtt

SEQ ID NO: 6029 - DNA, 33 bp, Homo sapiens
tgtcaccagtgtcacayggaaatggaaacctac

SEQ ID NO: 6030 - DNA, 33 bp, Homo sapiens
tgtccattgtgacttayagctgtctatgcctct

SEQ ID NO: 6031 - DNA, 33 bp, Homo sapiens
tgtccggaagtcctagyaggtgaaaggttaggt

SEQ ID NO: 6032 - DNA, 33 bp, Homo sapiens
tgtctattgtccttaarcaaggctacatcaagg

SEQ ID NO: 6033 - DNA, 33 bp, Homo sapiens
tgtctctcacctgaacygtgtagcaggcccctc

SEQ ID NO: 6034 - DNA, 33 bp, Homo sapiens
tgtctgctgttgagaaygaaggattactgagct

SEQ ID NO: 6035 - DNA, 33 bp, Homo sapiens
tgtctgtgacctgccayaacctctttgcctctt

SEQ ID NO: 6036 - DNA, 33 bp, Homo sapiens
tgtcttcacatttgacsatatgttaattgattc

SEQ ID NO: 6037 - DNA, 33 bp, Homo sapiens
tgtgaagaacagcaaarggtatataagtcttca

SEQ ID NO: 6038 - DNA, 33 bp, Homo sapiens
tgtgagtacaagagaaraggatcaaattgcagc

SEQ ID NO: 6039 - DNA, 33 bp, Homo sapiens
tgtgcaggtgtggttaygcattttgaaggagct

SEQ ID NO: 6040 - DNA, 33 bp, Homo sapiens
tgtgcatcagagacaasaggaacttttagaaac

SEQ ID NO: 6041 - DNA, 33 bp, Homo sapiens
tgtggaatccattcccmactaattcagtctcac

SEQ ID NO: 6042 - DNA, 33 bp, Homo sapiens
tgtggaggcgacaatcragtaaatccacagttc

SEQ ID NO: 6043 - DNA, 33 bp, Homo sapiens
tgtgggtatgaatcgayggtgtccctggagtgt

SEQ ID NO: 6044 - DNA, 33 bp, Homo sapiens
tgtgtcacacaggtcaytccggatcagacgccg

SEQ ID NO: 6045 - DNA, 33 bp, Homo sapiens
tgtgtccttctgtcaayatgtctaaaaccgccc

SEQ ID NO: 6046 - DNA, 33 bp, Homo sapiens
tgtgtgctgtttgacarctaatggcaatttata

SEQ ID NO: 6047 - DNA, 33 bp, Homo sapiens
tgtgtgttacagaaccrgctacaacctcaaaag

SEQ ID NO: 6048 - DNA, 33 bp, Homo sapiens
tgtgttatcaagttacwcttagtgcatgagttt

SEQ ID NO: 6049 - DNA, 33 bp, Homo sapiens
tgttagtttccacataygttttccctgtgttgt

SEQ ID NO: 6050 - DNA, 33 bp, Homo sapiens
tgttatgtattgggcayaaatcctggttgaaga

SEQ ID NO: 6051 - DNA, 33 bp, Homo sapiens
tgttgagttgggtcgakagattacattagtgtc

SEQ ID NO: 6052 - DNA, 33 bp, Homo sapiens
tgttgttttgagttgcrcaatttgagctttcca

SEQ ID NO: 6053 - DNA, 33 bp, Homo sapiens
tgtttccataagatgcraggaacaggtcacgta

SEQ ID NO: 6054 - DNA, 33 bp, Homo sapiens
tgttttgtggactgcaratgtttcataaggatt

SEQ ID NO: 6055 - DNA, 33 bp, Homo sapiens
ttaaaaacacaggggcwacattgtttgaaataa

SEQ ID NO: 6056 - DNA, 33 bp, Homo sapiens
ttaaacagctcatgacrgtatattacgtatatg

SEQ ID NO: 6057 - DNA, 33 bp, Homo sapiens
ttaaatccacattttayggctctctactacaaa

SEQ ID NO: 6058 - DNA, 33 bp, Homo sapiens
ttaaatgaagttttaargatacaacataaacac

SEQ ID NO: 6059 - DNA, 33 bp, Homo sapiens
ttaaattgtgaacttcragaaaaagagttctcg

SEQ ID NO: 6060 - DNA, 33 bp, Homo sapiens
ttaacacactctccacyactacctctgttcctc

SEQ ID NO: 6061 - DNA, 33 bp, Homo sapiens
ttaacagcaagattacmaacaaaattttagcaa

SEQ ID NO: 6062 - DNA, 33 bp, Homo sapiens
ttaacagtaatggaacmaatgtgaagcttctgc

SEQ ID NO: 6063 - DNA, 33 bp, Homo sapiens
ttaatttgcacaggaayagtttccatctctgga

SEQ ID NO: 6064 - DNA, 33 bp, Homo sapiens
ttacacttccttaagckccaattttcacaccaa

SEQ ID NO: 6065 - DNA, 33 bp, Homo sapiens
ttaccaggtcatgagaygaacagtgactagaag

SEQ ID NO: 6066 - DNA, 33 bp, Homo sapiens
ttaccagtctacctacyactgatggccatttag

SEQ ID NO: 6067 - DNA, 33 bp, Homo sapiens
ttacccacaaggattasgcaatctgcatcagac

SEQ ID NO: 6068 - DNA, 33 bp, Homo sapiens
ttaccccaatttttaastcccttgctcaccaca

SEQ ID NO: 6069 - DNA, 33 bp, Homo sapiens
ttaccccattttctgakgaagatactgacgcat

SEQ ID NO: 6070 - DNA, 33 bp, Homo sapiens
caagtgtcacaacccaytgaactgatgatcaaa

SEQ ID NO: 6071 - DNA, 33 bp, Homo sapiens
ttacttttgagatcacraaatgagcataaacag

SEQ ID NO: 6072 - DNA, 33 bp, Homo sapiens
ttagagagatgcctagragaatgtaacacaaaa

SEQ ID NO: 6073 - DNA, 33 bp, Homo sapiens
ttagcttgatgcacaargtcctccatgcttggc

SEQ ID NO: 6074 - DNA, 33 bp, Homo sapiens
ttaggataattccccaygccctagtggtcccta

SEQ ID NO: 6075 - DNA, 33 bp, Homo sapiens
ttagtcatttacaccaygatgggcttgacaaat

SEQ ID NO: 6076 - DNA, 33 bp, Homo sapiens
ttagtttagctggcaartcaaagtaacgtacaa

SEQ ID NO: 6077 - DNA, 33 bp, Homo sapiens
ttagtttgatttcttcrcttcagtttgtatatt

SEQ ID NO: 6078 - DNA, 33 bp, Homo sapiens
ttataaaactccatcarcatcgacaaaataatg

SEQ ID NO: 6079 - DNA, 33 bp, Homo sapiens
ttatctaagcaatgacyggagcgacttcaaatt

SEQ ID NO: 6080 - DNA, 33 bp, Homo sapiens
ttatcttcagtaacccmgaggactaaggatcct

SEQ ID NO: 6081 - DNA, 33 bp, Homo sapiens
ttatgccagtaccatcratctattttctcaaga

SEQ ID NO: 6082 - DNA, 33 bp, Homo sapiens
ttatggaatcaagatgmagctttacagtcagtg

SEQ ID NO: 6083 - DNA, 33 bp, Homo sapiens
ttatttcggtctgcaayttaagcatttacagca

SEQ ID NO: 6084 - DNA, 33 bp, Homo sapiens
ttatttttcagttccayatttctgactccaggg

SEQ ID NO: 6085 - DNA, 33 bp, Homo sapiens
ttcaagaggacctagtyaactcagtttcctggc

SEQ ID NO: 6086 - DNA, 33 bp, Homo sapiens
ttcaatgcggaggacasgttcaaggccactgct

SEQ ID NO: 6087 - DNA, 33 bp, Homo sapiens
ttcacattcagttttgmaacaatcttgaaataa

SEQ ID NO: 6088 - DNA, 33 bp, Homo sapiens
ttcataacagctccaarttggaaacagcgcaga

SEQ ID NO: 6089 - DNA, 33 bp, Homo sapiens
ttcataattgattccaracgtgcatgaatcttt

SEQ ID NO: 6090 - DNA, 33 bp, Homo sapiens
ttcatgtacctgttggkcacgtttatgtcttct

SEQ ID NO: 6091 - DNA, 33 bp, Homo sapiens
ttccaaatttgatggarcatggattcactataa

SEQ ID NO: 6092 - DNA, 33 bp, Homo sapiens
ttccaccaagtatacayatgagaaaaccacaaa

SEQ ID NO: 6093 - DNA, 33 bp, Homo sapiens
ttccactctcaagctasctgtatctaggaagtg

SEQ ID NO: 6094 - DNA, 33 bp, Homo sapiens
ttatcagccagtattgwaatttgtcaatatatc

SEQ ID NO: 6095 - DNA, 33 bp, Homo sapiens
ttccctcctgtgataaygcactaatccattaac

SEQ ID NO: 6096 - DNA, 33 bp, Homo sapiens
ttcctcctgactgctcyagaatctttttgactt

SEQ ID NO: 6097 - DNA, 33 bp, Homo sapiens
ttccttgaggcttcagractacaaaaaggcctt

SEQ ID NO: 6098 - DNA, 33 bp, Homo sapiens
ttccttgggtcactagrattttcttacttcaag

SEQ ID NO: 6099 - DNA, 33 bp, Homo sapiens
ttcctttctgcccatgkaggtttgggtttatac

SEQ ID NO: 6100 - DNA, 33 bp, Homo sapiens
ttccttttgtctgtaayagatttgaatatgtgt

SEQ ID NO: 6101 - DNA, 33 bp, Homo sapiens
ttcgaaaagataaagaygatacaacatgagaaa

SEQ ID NO: 6102 - DNA, 33 bp, Homo sapiens
ttcgcgagccgttaccrctctaaacgtcctagg

SEQ ID NO: 6103 - DNA, 33 bp, Homo sapiens
ttcgttgcagaagcaascatttgatcctccatt

SEQ ID NO: 6104 - DNA, 33 bp, Homo sapiens
ttcgttttatggctgargaaagttgtacagaaa

SEQ ID NO: 6105 - DNA, 33 bp, Homo sapiens
ttctaaagaataactasgagcagagaaaaacac

SEQ ID NO: 6106 - DNA, 33 bp, Homo sapiens
ttctcagctcaatctaraactgcttccttctcc

SEQ ID NO: 6107 - DNA, 33 bp, Homo sapiens
ttctcattgttttttamggacaacttgtacatc

SEQ ID NO: 6108 - DNA, 33 bp, Homo sapiens
ttctgcagggaaatgcrgaaactatcttaggat

SEQ ID NO: 6109 - DNA, 33 bp, Homo sapiens
ttctgcttttctggaaratagccatcgaacaag

SEQ ID NO: 6110 - DNA, 33 bp, Homo sapiens
gcaattcaaacacatcrccaggcttcactttta

SEQ ID NO: 6111 - DNA, 33 bp, Homo sapiens
cattactaatgacttaygaacttgaatcagatt

SEQ ID NO: 6112 - DNA, 33 bp, Homo sapiens
ttcttctcctgtggtamaagaatatgtgtctca

SEQ ID NO: 6113 - DNA, 33 bp, Homo sapiens
ttcttgctcaattaaayttcaaaacatgtattg

SEQ ID NO: 6114 - DNA, 33 bp, Homo sapiens
ggacaccttgtatgacycttagagaaaggagca

SEQ ID NO: 6115 - DNA, 33 bp, Homo sapiens
ttcttttcatgaaagayatttggcaatagttgg

SEQ ID NO: 6116 - DNA, 33 bp, Homo sapiens
ttcttttcctgcccccsaaaggtgtatgacatc

SEQ ID NO: 6117 - DNA, 33 bp, Homo sapiens
ttgaactgacttcttaygaaatgagggcagaaa

SEQ ID NO: 6118 - DNA, 33 bp, Homo sapiens
ttgaagcaagtcggcakgacctcagtgggaaag

SEQ ID NO: 6119 - DNA, 33 bp, Homo sapiens
ttgaattgtgcttagascttttccagtagctga

SEQ ID NO: 6120 - DNA, 33 bp, Homo sapiens
ttgacccatattcaagraatggcagcctcaaca

SEQ ID NO: 6121 - DNA, 33 bp, Homo sapiens
ttgagactctgtacaarttcctaccttccccat

SEQ ID NO: 6122 - DNA, 33 bp, Homo sapiens
ttgcaactgattatcastaatgttgtgagtggt

SEQ ID NO: 6123 - DNA, 33 bp, Homo sapiens
ttgcagcacttacctckaattactctacatgga

SEQ ID NO: 6124 - DNA, 33 bp, Homo sapiens
ttgcatttccaccaacratatttaagagtcctc

SEQ ID NO: 6125 - DNA, 33 bp, Homo sapiens
ttgccccacatttggaygagccagtaagaaaat

SEQ ID NO: 6126 - DNA, 33 bp, Homo sapiens
ttgcctctaacactgawgatattccactcatat

SEQ ID NO: 6127 - DNA, 33 bp, Homo sapiens
ttgcctggcacttagtraacagtcaatgaatgg

SEQ ID NO: 6128 - DNA, 33 bp, Homo sapiens
ttgctacagagaaaaaygaactaggataaggaa

SEQ ID NO: 6129 - DNA, 33 bp, Homo sapiens
ttgctagcatcctaccrggctttcaaaagacaa

SEQ ID NO: 6130 - DNA, 33 bp, Homo sapiens
ttgctctagacacttaygtgagtacagccttat

SEQ ID NO: 6131 - DNA, 33 bp, Homo sapiens
ttgctgtggttggccayagtagacacacgcttt

SEQ ID NO: 6132 - DNA, 33 bp, Homo sapiens
ttgcttcagtgccttcratactgtaaactttct

SEQ ID NO: 6133 - DNA, 33 bp, Homo sapiens
ttggcaaagggtcctartaaagtcacagcatcc

SEQ ID NO: 6134 - DNA, 33 bp, Homo sapiens
ttggccaaaacaaccayctgagaatcaaaacca

SEQ ID NO: 6135 - DNA, 33 bp, Homo sapiens
ttggtgactatggccayatagtttgaagtcggg

SEQ ID NO: 6136 - DNA, 33 bp, Homo sapiens
ttggttctagtaagcartcacagtactgtttgt

SEQ ID NO: 6137 - DNA, 33 bp, Homo sapiens
ttgtatacctgcagaayggaattagttagaata

SEQ ID NO: 6138 - DNA, 33 bp, Homo sapiens
ttgtatcagttgtttaygtgcaaatcatgtgtc

SEQ ID NO: 6139 - DNA, 33 bp, Homo sapiens
ttgtcattaatgtgaawgtgttaagcatattgc

SEQ ID NO: 6140 - DNA, 33 bp, Homo sapiens
ttgtcgagactgagagragaagacaagattgtt

SEQ ID NO: 6141 - DNA, 33 bp, Homo sapiens
ttgtgaaccaattgtamcctaacttaataggta

SEQ ID NO: 6142 - DNA, 33 bp, Homo sapiens
ttgtgagccagttaaayctcctctctttacaaa

SEQ ID NO: 6143 - DNA, 33 bp, Homo sapiens
ttgttaagtatgatggyatatcaccgctcttat

SEQ ID NO: 6144 - DNA, 33 bp, Homo sapiens
ttgttgtgttgtggccwacaatatgtgccatcc

SEQ ID NO: 6145 - DNA, 33 bp, Homo sapiens
ttgttgtttatatgaaytaggcactgtttatac

SEQ ID NO: 6146 - DNA, 33 bp, Homo sapiens
ttgtttgtatccttcamtgaaatgtacattcca

SEQ ID NO: 6147 - DNA, 33 bp, Homo sapiens
ttgtttttccttttcawctgcactagggctgtg

SEQ ID NO: 6148 - DNA, 33 bp, Homo sapiens
tttaaaacttctgcacycacaaagagaacaaaa

SEQ ID NO: 6149 - DNA, 33 bp, Homo sapiens
tttaaaaggtatattasagatccaactagattc

SEQ ID NO: 6150 - DNA, 33 bp, Homo sapiens
tttaaagctacctttaygagattttcgtgatag

SEQ ID NO: 6151 - DNA, 33 bp, Homo sapiens
gcccctcattcacaccrgagttctcacttgagc

SEQ ID NO: 6152 - DNA, 33 bp, Homo sapiens
tttactcgttgaacgamaaagagaatgagccct

SEQ ID NO: 6153 - DNA, 33 bp, Homo sapiens
tttagaaaaacaagaartcagtgcatggtaaat

SEQ ID NO: 6154 - DNA, 33 bp, Homo sapiens
tttagaggtccacatarctcagatttagaaact

SEQ ID NO: 6155 - DNA, 33 bp, Homo sapiens
tttagttgagtatgaaragtagagctagcaaca

SEQ ID NO: 6156 - DNA, 33 bp, Homo sapiens
tttataacttgagaaamtctgcttatttataaa

SEQ ID NO: 6157 - DNA, 33 bp, Homo sapiens
tttatcagcagttgcayaatgaatcgggggaag

SEQ ID NO: 6158 - DNA, 33 bp, Homo sapiens
tttatgtctcccaccartaattttttttctaaa

SEQ ID NO: 6159 - DNA, 33 bp, Homo sapiens
tttatttgatatttgcraggagagtataagcaa

SEQ ID NO: 6160 - DNA, 33 bp, Homo sapiens
tttcaactcttagcaarttattctgatagttac

SEQ ID NO: 6161 - DNA, 33 bp, Homo sapiens
tttcactgttaactatsataggtgagatcataa

SEQ ID NO: 6162 - DNA, 33 bp, Homo sapiens
tttcagatacagtaccyatatgacattgatcat

SEQ ID NO: 6163 - DNA, 33 bp, Homo sapiens
tttccatttacttggcraatagaactaatatcc

SEQ ID NO: 6164 - DNA, 33 bp, Homo sapiens
tttctaggctgtatcayccagctacacttcttc

SEQ ID NO: 6165 - DNA, 33 bp, Homo sapiens
tttcttgttgctccttraagaaattattttggg

SEQ ID NO: 6166 - DNA, 33 bp, Homo sapiens
tttgaggaatggttccraaatgaaattcaaaga

SEQ ID NO: 6167 - DNA, 33 bp, Homo sapiens
tttgatgtatttgtatwaacagtgcttattctt

SEQ ID NO: 6168 - DNA, 33 bp, Homo sapiens
tttgcctgatcctttayctttaagcaaacccat

SEQ ID NO: 6169 - DNA, 33 bp, Homo sapiens
tttgctcaatggaaaaraagtctatgttcacct

SEQ ID NO: 6170 - DNA, 33 bp, Homo sapiens
tttgctgctgcctataygagaagaccccagctc

SEQ ID NO: 6171 - DNA, 33 bp, Homo sapiens
tttgggggctgagctasattgctggtgggatta

SEQ ID NO: 6172 - DNA, 33 bp, Homo sapiens
tttggtgaaaatatccyctacatcgcgtgtgca

SEQ ID NO: 6173 - DNA, 33 bp, Homo sapiens
tttgtcaagcatggggsacagatcccaattcag

SEQ ID NO: 6174 - DNA, 33 bp, Homo sapiens
tttgtggagggccaaayggtcaaacacatctta

SEQ ID NO: 6175 - DNA, 33 bp, Homo sapiens
tttgtggttaggaaaasagaaataagaacaaca

SEQ ID NO: 6176 - DNA, 33 bp, Homo sapiens
tttgtgtatttaggtaygtattcaatctctttt

SEQ ID NO: 6177 - DNA, 33 bp, Homo sapiens
tttgtgtggtagacacygaaaagataagaaaac

SEQ ID NO: 6178 - DNA, 33 bp, Homo sapiens
ttttaacttctcccaaytaaatattcaggtaaa

SEQ ID NO: 6179 - DNA, 33 bp, Homo sapiens
ttttatgaaccacttcrgaaagctttcatcaag

SEQ ID NO: 6180 - DNA, 33 bp, Homo sapiens
ttttatgtagatggaayggaaggtttatgtagg

SEQ ID NO: 6181 - DNA, 33 bp, Homo sapiens
ttttcccgttgagaaarttcaagttccgagagg

SEQ ID NO: 6182 - DNA, 33 bp, Homo sapiens
ttttgaaaaatttagayggcagtattcttggta

SEQ ID NO: 6183 - DNA, 33 bp, Homo sapiens
ttttgcagttaaattcycatggtcaaaaatgca

SEQ ID NO: 6184 - DNA, 33 bp, Homo sapiens
ttttgccgttgcacctraaactgcagaagttat

SEQ ID NO: 6185 - DNA, 33 bp, Homo sapiens
ttttggcagatggtctraacaaagtagctaaag

SEQ ID NO: 6186 - DNA, 33 bp, Homo sapiens
ttttgttgcctattaastctgcagttgcaccac

SEQ ID NO: 6187 - DNA, 33 bp, Homo sapiens
tttttataaagtcatawctggcaatctttttta

SEQ ID NO: 6188 - DNA, 33 bp, Homo sapiens
tcccatcttgggagaawacatggatggataagt

SEQ ID NO: 6189 - DNA, 33 bp, Homo sapiens
tgaattgcctctttatmacttccgtccatttta

SEQ ID NO: 6190 - DNA, 33 bp, Homo sapiens
gagctatcctaacacartaagagaggaaaagca

SEQ ID NO: 6191 - DNA, 33 bp, Homo sapiens
tgttcattcatacctayagcgtacagaaccact

SEQ ID NO: 6192 - DNA, 33 bp, Homo sapiens
tgtatatatgcctttamcttatcaactttgttt

SEQ ID NO: 6193 - DNA, 33 bp, Homo sapiens
tttaagtttctctttaraaattgcactgaagaa

SEQ ID NO: 6194 - DNA, 33 bp, Homo sapiens
cagagtcccttctcatraaactttcattccatg

SEQ ID NO: 6195 - DNA, 33 bp, Homo sapiens
aatgaaggttgccagcrgaatactgagagaaag

SEQ ID NO: 6196 - DNA, 33 bp, Homo sapiens
tctgggtttatttccaygctaaattctggactg

SEQ ID NO: 6197 - DNA, 33 bp, Homo sapiens
accaagtaagtaaggcragaagggattctgttt

SEQ ID NO: 6198 - DNA, 33 bp, Homo sapiens
aacggccctaatcaagwccagcttcttcacaat

SEQ ID NO: 6199 - DNA, 33 bp, Homo sapiens
atgtttgcttcattcamagtaaatagtaaaccc

SEQ ID NO: 6200 - DNA, 33 bp, Homo sapiens
caagttaatgggttggraatagattaacacgta

SEQ ID NO: 6201 - DNA, 33 bp, Homo sapiens
ccggtgaaacagcgttyggtggccactgaccgg

SEQ ID NO: 6202 - DNA, 33 bp, Homo sapiens
aattaattgagcaaaasattatcagtggatgct

SEQ ID NO: 6203 - DNA, 33 bp, Homo sapiens
cccaacagcagtgcaarctcccatgtatggagt

SEQ ID NO: 6204 - DNA, 33 bp, Homo sapiens
tccatgtgttgtctctmactgatttagcttttt

SEQ ID NO: 6205 - DNA, 33 bp, Homo sapiens
agatgggttctgtatgraaaacggtcctggatg

SEQ ID NO: 6206 - DNA, 33 bp, Homo sapiens
agccacagcacacactyaaaccatcattgttca

SEQ ID NO: 6207 - DNA, 33 bp, Homo sapiens
ttgaaaggaaggcaccwcttagaatgtggattt

SEQ ID NO: 6208 - DNA, 33 bp, Homo sapiens
atgcagcaaatgcttcmaataatagtaaactat

SEQ ID NO: 6209 - DNA, 33 bp, Homo sapiens
gctgctgagtttactcsatagctttcaaacctt

SEQ ID NO: 6210 - DNA, 33 bp, Homo sapiens
gaattctgccatggaaratgaaactttgaaaag

SEQ ID NO: 6211 - DNA, 33 bp, Homo sapiens
gagaaaattatgaaaastgagacgtgcaatgtt

SEQ ID NO: 6212 - DNA, 33 bp, Homo sapiens
tgaacacagcctaagartatggaaacagaaagg

SEQ ID NO: 6213 - DNA, 33 bp, Homo sapiens
tatgaatgttaatgaaycaattttgctgattta

SEQ ID NO: 6214 - DNA, 33 bp, Homo sapiens
gtcagttcacaggctayggaactgtcaagacca

SEQ ID NO: 6215 - DNA, 33 bp, Homo sapiens
tgctgaatttttgcagraaatcactgaacacac

SEQ ID NO: 6216 - DNA, 33 bp, Homo sapiens
gatgatcaaaaatatawgcccagtagtgcccag

SEQ ID NO: 6217 - DNA, 33 bp, Homo sapiens
gcctgtgactttccaamatccatttaatatgtc

SEQ ID NO: 6218 - DNA, 33 bp, Homo sapiens
aagctgtggttccagartatgatcaaataattg

SEQ ID NO: 6219 - DNA, 33 bp, Homo sapiens
attggagaggaacaaarcagtatctggtgggtg

SEQ ID NO: 6220 - DNA, 33 bp, Homo sapiens
agcttccctgagctaaygtggttctgcttgtgt

SEQ ID NO: 6221 - DNA, 33 bp, Homo sapiens
aacatttcatttctgtkttgggtcactttcctt

SEQ ID NO: 6222 - DNA, 33 bp, Homo sapiens
tcagaacacatgatccracaagcataaatgtcc

SEQ ID NO: 6223 - DNA, 33 bp, Homo sapiens
tggtatgcaggccaccracatatggctaattca

SEQ ID NO: 6224 - DNA, 33 bp, Homo sapiens
aaggtaaataatcacaratcaatagcatcctta

SEQ ID NO: 6225 - DNA, 33 bp, Homo sapiens
agtccagttccaagttrgaggtccacattcaaa

SEQ ID NO: 6226 - DNA, 33 bp, Homo sapiens
gaatcgttttatggctkaatcatgctcctgatc

SEQ ID NO: 6227 - DNA, 33 bp, Homo sapiens
ttcagaagtcaaccttyaactgagaggcaggtg

SEQ ID NO: 6228 - DNA, 33 bp, Homo sapiens
atcactttcaaattccraaaactgttcagagcc

SEQ ID NO: 6229 - DNA, 33 bp, Homo sapiens
gatctttctctctccaytgcttggctctgcgtt

SEQ ID NO: 6230 - DNA, 33 bp, Homo sapiens
aaaagtgatagtagaartgttaggacctgagta

SEQ ID NO: 6231 - DNA, 33 bp, Homo sapiens
aatctggtagacataargaaaactgcacttggg

SEQ ID NO: 6232 - DNA, 33 bp, Homo sapiens
gctcaggcagttaagaygagatgaaagatttct

SEQ ID NO: 6233 - DNA, 33 bp, Homo sapiens
caggcacacaaagtacrgctccaaggttttgat

SEQ ID NO: 6234 - DNA, 33 bp, Homo sapiens
gtgatgggaacaaagawgtaaactagtatgatt

SEQ ID NO: 6235 - DNA, 33 bp, Homo sapiens
tgagaacttgaaaagawgctaggaattaaataa

SEQ ID NO: 6236 - DNA, 33 bp, Homo sapiens
tctcttcttttctcagycacgcttgtagttagg

SEQ ID NO: 6237 - DNA, 33 bp, Homo sapiens
gaaagctcctttggtcragaagaattagctaca

SEQ ID NO: 6238 - DNA, 33 bp, Homo sapiens
gtcttttcattttctcrcactgctgaataaata

SEQ ID NO: 6239 - DNA, 33 bp, Homo sapiens
tgggctatttcagaccraactaaacagcacagg

SEQ ID NO: 6240 - DNA, 33 bp, Homo sapiens
tgtcatttgaaaaccastgctctataacatttt

SEQ ID NO: 6241 - DNA, 33 bp, Homo sapiens
actgatggcctctttakcactgtgcttctggaa

SEQ ID NO: 6242 - DNA, 33 bp, Homo sapiens
aggacacaaagtaaccratatttccatagactc

SEQ ID NO: 6243 - DNA, 33 bp, Homo sapiens
ggatcacagaaagtcayatacccaatttcctgt

SEQ ID NO: 6244 - DNA, 33 bp, Homo sapiens
tttctcagtcctctaasagattaaggtgataca

SEQ ID NO: 6245 - DNA, 33 bp, Homo sapiens
attcagaatgtttgcgratctcagataattgaa

SEQ ID NO: 6246 - DNA, 33 bp, Homo sapiens
cccagtgggtcacagtracatacaaagcagcag

SEQ ID NO: 6247 - DNA, 33 bp, Homo sapiens
caacttctacaaggcaratttactgatctttat

SEQ ID NO: 6248 - DNA, 33 bp, Homo sapiens
tgtcacaacaatcttaygcattaggtgctattg

SEQ ID NO: 6249 - DNA, 33 bp, Homo sapiens
cctacacacaaactcartcactatcccagacta

SEQ ID NO: 6250 - DNA, 33 bp, Homo sapiens
agctctaatcaccatamaaagcatcaagttttc

SEQ ID NO: 6251 - DNA, 33 bp, Homo sapiens
gttacaccatatgttargcaatggaggcaaaac

SEQ ID NO: 6252 - DNA, 33 bp, Homo sapiens
agggtaccacgttcaaytccaaagtcggcttca

SEQ ID NO: 6253 - DNA, 33 bp, Homo sapiens
agcttcacaaacacaaytacctgttactaaaat

SEQ ID NO: 6254 - DNA, 33 bp, Homo sapiens
tgaatgtgaagaaacaytgattgtacacgtaac

SEQ ID NO: 6255 - DNA, 33 bp, Homo sapiens
gctagaataactgtaartgatgcactgtgggac

SEQ ID NO: 6256 - DNA, 33 bp, Homo sapiens
gtaaaatacaggttggwaaagcatttgattagc

SEQ ID NO: 6257 - DNA, 33 bp, Homo sapiens
gccctggggatcagtargaagcccgacgcatag

SEQ ID NO: 6258 - DNA, 33 bp, Homo sapiens
cctgttttcagcaaaargtataattctgtatca

SEQ ID NO: 6259 - DNA, 33 bp, Homo sapiens
tgaagtcaaacattcamattggaagaaagagct

SEQ ID NO: 6260 - DNA, 33 bp, Homo sapiens
aggttgaagaggtacgyaggagacaattgcagg

SEQ ID NO: 6261 - DNA, 33 bp, Homo sapiens
tgatagctgtttctgargaaattaaccttagga

SEQ ID NO: 6262 - DNA, 33 bp, Homo sapiens
cattcatgaggattagsacttggtatagaacat

SEQ ID NO: 6263 - DNA, 33 bp, Homo sapiens
cactattagaaagagayggagctatgatttaac

SEQ ID NO: 6264 - DNA, 33 bp, Homo sapiens
ctagccttcctgatgaygacttttcacagtaat

SEQ ID NO: 6265 - DNA, 33 bp, Homo sapiens
gaattacctcggatcayggtcaaatcttacacc

SEQ ID NO: 6266 - DNA, 33 bp, Homo sapiens
caaccgcagatccatamaaattctatccttgat

SEQ ID NO: 6267 - DNA, 33 bp, Homo sapiens
ctagttatgcaaagtaytaccactggggaaagc

SEQ ID NO: 6268 - DNA, 33 bp, Homo sapiens
gtgctctatactcatasaactggcaatataatt

SEQ ID NO: 6269 - DNA, 33 bp, Homo sapiens
gttattgctgatgcacyggtgtgacttctcaat

SEQ ID NO: 6270 - DNA, 33 bp, Homo sapiens
taaatgatgcagttgargtaaccatggactagt

SEQ ID NO: 6271 - DNA, 33 bp, Homo sapiens
catttaaaacagtgtaygtcagatttgtgtacc

SEQ ID NO: 6272 - DNA, 33 bp, Homo sapiens
ttcctgtaattcttccyactgctgttgttgagc

SEQ ID NO: 6273 - DNA, 33 bp, Homo sapiens
atgtttgaaaaaaggcyaaaggtcagattgtgt

SEQ ID NO: 6274 - DNA, 33 bp, Homo sapiens
ggctttaagtagaagaraagtacattgataaca

SEQ ID NO: 6275 - DNA, 33 bp, Homo sapiens
tctagaggctaacccakctggactctggaggaa

SEQ ID NO: 6276 - DNA, 33 bp, Homo sapiens
actataactttggtacraggatcttactgtttc

SEQ ID NO: 6277 - DNA, 33 bp, Homo sapiens
ggctgtcattcctacargccagtataataacac

SEQ ID NO: 6278 - DNA, 33 bp, Homo sapiens
ttcaatgaagatggaaraagtaaaagctagtca

SEQ ID NO: 6279 - DNA, 33 bp, Homo sapiens
agattatgtgacctaaygttggttaatgagaaa

SEQ ID NO: 6280 - DNA, 33 bp, Homo sapiens
ccaacatcttaactcaytacagcttcaagtcca

SEQ ID NO: 6281 - DNA, 33 bp, Homo sapiens
ttaatatttttgattcrccaattagaccataaa

SEQ ID NO: 6282 - DNA, 33 bp, Homo sapiens
cttccactggacaagawggcagatgttgtcact

SEQ ID NO: 6283 - DNA, 33 bp, Homo sapiens
gctaacgtttgggtcayagtatatagtttttaa

SEQ ID NO: 6284 - DNA, 33 bp, Homo sapiens
taccaaatccagaaatyatttaacacagatgta

SEQ ID NO: 6285 - DNA, 33 bp, Homo sapiens
catactgcctttggtayagtaggtagatagcca

SEQ ID NO: 6286 - DNA, 33 bp, Homo sapiens
aatgggcgctcaagtayctgggctcataactgt

SEQ ID NO: 6287 - DNA, 33 bp, Homo sapiens
ctgcattaaaggttgakttttccttagtgctca

SEQ ID NO: 6288 - DNA, 33 bp, Homo sapiens
ctgactgtattctgtarctgagtcagagggtgc

SEQ ID NO: 6289 - DNA, 33 bp, Homo sapiens
tgagcttctgaaatgcraaactatggattaatt

SEQ ID NO: 6290 - DNA, 33 bp, Homo sapiens
aaaaatctctttgtacmggtcagcatggtgtgg

SEQ ID NO: 6291 - DNA, 33 bp, Homo sapiens
cctctgcttaaccggarcggccgaacagcgcag

SEQ ID NO: 6292 - DNA, 33 bp, Homo sapiens
ataaacgaaaattaaamgagagttcacggccta

SEQ ID NO: 6293 - DNA, 33 bp, Homo sapiens
ctcaggtggaaacgaakgcgccccgtggcaggc

SEQ ID NO: 6294 - DNA, 33 bp, Homo sapiens
ttaaggtaaatgatgamaactgcaaaagagtga

SEQ ID NO: 6295 - DNA, 33 bp, Homo sapiens
cttcaagttaagaaatkatggcatgacctgagt

SEQ ID NO: 6296 - DNA, 33 bp, Homo sapiens
gacagtgcaggtacggyaatatttctgcactca

SEQ ID NO: 6297 - DNA, 33 bp, Homo sapiens
tggcctggaaagaacakctacagtatggccaca

SEQ ID NO: 6298 - DNA, 33 bp, Homo sapiens
tcttgtctgattctaayacctatactctttcca

SEQ ID NO: 6299 - DNA, 33 bp, Homo sapiens
ttatgatgatggtaatrataacagccaacattt

SEQ ID NO: 6300 - DNA, 33 bp, Homo sapiens
tcacatgtatggcaaarttgtatggagttctaa

SEQ ID NO: 6301 - DNA, 33 bp, Homo sapiens
gtgttgtctcctaaaayaggactgtcttgccag

SEQ ID NO: 6302 - DNA, 33 bp, Homo sapiens
aactggttgctcttcaytcatggtcaaggagag

SEQ ID NO: 6303 - DNA, 33 bp, Homo sapiens
tgatcattgttctggtmaatgctccagccgctc

SEQ ID NO: 6304 - DNA, 33 bp, Homo sapiens
aaaattggtagaatgtwaaatccttgacagcct

SEQ ID NO: 6305 - DNA, 33 bp, Homo sapiens
agaattttgtttctcaractgcctctctcaccc

SEQ ID NO: 6306 - DNA, 33 bp, Homo sapiens
agtccaccttttagtamgtgcttagatattcag

SEQ ID NO: 6307 - DNA, 33 bp, Homo sapiens
ctcagtgtcatagttaycaaggggcaatgccaa

SEQ ID NO: 6308 - DNA, 33 bp, Homo sapiens
agagttacgaatttctractcagtctttgagag

SEQ ID NO: 6309 - DNA, 33 bp, Homo sapiens
tttagaatacagtgaartgtgaaggaatgattt

SEQ ID NO: 6310 - DNA, 33 bp, Homo sapiens
caaaattagtcatactyaggttgaaagaaaagt

SEQ ID NO: 6311 - DNA, 33 bp, Homo sapiens
tttgatcttcctctcartaatttgacatcaaac

SEQ ID NO: 6312 - DNA, 33 bp, Homo sapiens
gccagaactggttgtaygtctatcttaccatat

SEQ ID NO: 6313 - DNA, 33 bp, Homo sapiens
caccctccatcggtaasaagatcaccaggcatt

SEQ ID NO: 6314 - DNA, 33 bp, Homo sapiens
tggtaacaaacagaaaygtgtgaaattgttcag

SEQ ID NO: 6315 - DNA, 33 bp, Homo sapiens
tgagataaaaaagaaasgataattgaagctggc

SEQ ID NO: 6316 - DNA, 33 bp, Homo sapiens
gctctgagtctttttcmaacaactggggaaagt

SEQ ID NO: 6317 - DNA, 33 bp, Homo sapiens
gctctggagccatttcyacactgactggaacca

SEQ ID NO: 6318 - DNA, 33 bp, Homo sapiens
tcacatgaaacaaagcragaatcagagaacaaa

SEQ ID NO: 6319 - DNA, 33 bp, Homo sapiens
ttcatttattccacagrcatttctaaacaccta

SEQ ID NO: 6320 - DNA, 33 bp, Homo sapiens
gccatacaacagaatcrctcgtgctgctttcca

SEQ ID NO: 6321 - DNA, 33 bp, Homo sapiens
agccgagaagcaggaartgactccacccagcat

SEQ ID NO: 6322 - DNA, 33 bp, Homo sapiens
tagtgaaaagcaccccyatctattcagttgtcc

SEQ ID NO: 6323 - DNA, 33 bp, Homo sapiens
tgccttctattttatargtaatctcaacagcag

SEQ ID NO: 6324 - DNA, 33 bp, Homo sapiens
ataggatatcaaagaaygagtgtgaatcagcta

SEQ ID NO: 6325 - DNA, 33 bp, Homo sapiens
acccagctctttgaaakataactgataactagt

SEQ ID NO: 6326 - DNA, 33 bp, Homo sapiens
gggtggctcgcaaggakggtggattagtttcct

SEQ ID NO: 6327 - DNA, 33 bp, Homo sapiens
ttatttgtttctcttgyaatgcttaatattggg

SEQ ID NO: 6328 - DNA, 33 bp, Homo sapiens
ttctctcatgtctgacmggtaagacagggcaca

SEQ ID NO: 6329 - DNA, 33 bp, Homo sapiens
taaaaaccctagtgacyccagcaaattagaagt

SEQ ID NO: 6330 - DNA, 33 bp, Homo sapiens
ctgattacattgtcgcrccaattttgtaggtca

SEQ ID NO: 6331 - DNA, 33 bp, Homo sapiens
gagatgctgaataaagrcaagcgatgatttctt

SEQ ID NO: 6332 - DNA, 33 bp, Homo sapiens
cacaggaaacttcccaygacatattaaaatgga

SEQ ID NO: 6333 - DNA, 33 bp, Homo sapiens
tattcacataagcaagmaaactaaactattcat

SEQ ID NO: 6334 - DNA, 33 bp, Homo sapiens
aagtttcaggtctctcraatgataatgatgatc

SEQ ID NO: 6335 - DNA, 33 bp, Homo sapiens
ggctttgttcttagcartacagtttaagcaatt

SEQ ID NO: 6336 - DNA, 33 bp, Homo sapiens
tttcctaggcactatcraattgcattccatgga

SEQ ID NO: 6337 - DNA, 33 bp, Homo sapiens
attcagtcaccagatcrctttcaccaccttgtt

SEQ ID NO: 6338 - DNA, 33 bp, Homo sapiens
gaatggtaaattgatcwctgattaatggaaagc

SEQ ID NO: 6339 - DNA, 33 bp, Homo sapiens
tatttttatacaacaarttcccactcctaacat

SEQ ID NO: 6340 - DNA, 33 bp, Homo sapiens
caggccaccagctatcragggctaggaaagggt

SEQ ID NO: 6341 - DNA, 33 bp, Homo sapiens
aatgtgaccctttgccycagatagcttcagaag

SEQ ID NO: 6342 - DNA, 33 bp, Homo sapiens
tacacacagcatatatmaactttgaaatgtatt

SEQ ID NO: 6343 - DNA, 33 bp, Homo sapiens
agattagaaggaaataycaataaagccaaagtt

SEQ ID NO: 6344 - DNA, 33 bp, Homo sapiens
gactcgaacgcaggtaraggacagggagagttc

SEQ ID NO: 6345 - DNA, 33 bp, Homo sapiens
aagatgacaggtgtccrgcaaattaaactctta

SEQ ID NO: 6346 - DNA, 33 bp, Homo sapiens
gtttaaatatctcttayctggacaataacaatg

SEQ ID NO: 6347 - DNA, 33 bp, Homo sapiens
gctttaaaacttgatcygaatttagaagcaaaa

SEQ ID NO: 6348 - DNA, 33 bp, Homo sapiens
ctgattaaccagcagarcacctagcatgatgcc

SEQ ID NO: 6349 - DNA, 33 bp, Homo sapiens
atgttgactattttcaratgcacataatctctt

SEQ ID NO: 6350 - DNA, 33 bp, Homo sapiens
gttagcaaatgtactayaatgcaaaccatcttt

SEQ ID NO: 6351 - DNA, 33 bp, Homo sapiens
gaaatgcgcattcaggmaaaaaacagtatttgt

SEQ ID NO: 6352 - DNA, 33 bp, Homo sapiens
ataaaatcaaatctacsctgccacttttatatc

SEQ ID NO: 6353 - DNA, 33 bp, Homo sapiens
agaatgcggaaatggakgtagggatgcctattt

SEQ ID NO: 6354 - DNA, 33 bp, Homo sapiens
agcagtccttactccayggatcatttagtttac

SEQ ID NO: 6355 - DNA, 33 bp, Homo sapiens
atactcacagtgcagakctagaaatgtctgtgc

SEQ ID NO: 6356 - DNA, 33 bp, Homo sapiens
acagatggtttgtggayaaatgatcactaggaa

SEQ ID NO: 6357 - DNA, 33 bp, Homo sapiens
acaggtcaacttgagakgtttttaatatgctta

SEQ ID NO: 6358 - DNA, 33 bp, Homo sapiens
caagtaaaaagcaaaaytgaactaaaggcaagg

SEQ ID NO: 6359 - DNA, 33 bp, Homo sapiens
tcaccactaacctcaaytctaccttatccctaa

SEQ ID NO: 6360 - DNA, 33 bp, Homo sapiens
ttgtcttaaccaaaaaygtgatgttcccacatg

SEQ ID NO: 6361 - DNA, 33 bp, Homo sapiens
taatggccatacttgcmgaaataaggtggtggt

SEQ ID NO: 6362 - DNA, 33 bp, Homo sapiens
attcagccgctcctaartaggtggccagattgt

SEQ ID NO: 6363 - DNA, 33 bp, Homo sapiens
cctgaactctgtgacarcacgtcttagacttta

SEQ ID NO: 6364 - DNA, 33 bp, Homo sapiens
aaaaactgcacatttawcccaaactcaggtatg

SEQ ID NO: 6365 - DNA, 33 bp, Homo sapiens
aaaaactgccaaacatraaaaccagaccagaat

SEQ ID NO: 6366 - DNA, 33 bp, Homo sapiens
aaaaatacttaagataygaacctctcagatttt

SEQ ID NO: 6367 - DNA, 33 bp, Homo sapiens
aaaaccaacccgaacartacaatgatttcatcc

SEQ ID NO: 6368 - DNA, 33 bp, Homo sapiens
aaaaccagatataaacygaactaagtatgccaa

SEQ ID NO: 6369 - DNA, 33 bp, Homo sapiens
aaaacttcattgcttcyatggagtctttaggga

SEQ ID NO: 6370 - DNA, 33 bp, Homo sapiens
aaaagaattgaagctayctatattacgtcctat

SEQ ID NO: 6371 - DNA, 33 bp, Homo sapiens
aaaagatggtgaagtarggaccagaaaacaggg

SEQ ID NO: 6372 - DNA, 33 bp, Homo sapiens
aaaagtactggacccgkaatcaggtgtccttcc

SEQ ID NO: 6373 - DNA, 33 bp, Homo sapiens
aaaatctctccctgctsaaatgtaaccattaat

SEQ ID NO: 6374 - DNA, 33 bp, Homo sapiens
aaaatgtcctaattctraaaatgatttatcagg

SEQ ID NO: 6375 - DNA, 33 bp, Homo sapiens
aaacaaaccaatatgcratcagcaggtataaca

SEQ ID NO: 6376 - DNA, 33 bp, Homo sapiens
aaacacccaggatggaracattacacttgaaaa

SEQ ID NO: 6377 - DNA, 33 bp, Homo sapiens
aaacagcagtgagaacmattgcaacacaaaaac

SEQ ID NO: 6378 - DNA, 33 bp, Homo sapiens
aaacatacttgctagayactggttcaactatga

SEQ ID NO: 6379 - DNA, 33 bp, Homo sapiens
aaactatcattgtttargtagaggaggttcaat

SEQ ID NO: 6380 - DNA, 33 bp, Homo sapiens
aaactggtcagaggcasgattggcatagcatgg

SEQ ID NO: 6381 - DNA, 33 bp, Homo sapiens
aaagaccattatgccasagataaaataagttgc

SEQ ID NO: 6382 - DNA, 33 bp, Homo sapiens
aaagaggagaaagacayggatgtgaacttggtt

SEQ ID NO: 6383 - DNA, 33 bp, Homo sapiens
aaagcaggtaatgtcayaaaggatttgccattt

SEQ ID NO: 6384 - DNA, 33 bp, Homo sapiens
aaagctcaattcgaacsggaataaacacagacc

SEQ ID NO: 6385 - DNA, 33 bp, Homo sapiens
aaagcttattgaaactsaatgccactttcagat

SEQ ID NO: 6386 - DNA, 33 bp, Homo sapiens
aaaggcaaattttgcaytcaaaaacagaaatgc

SEQ ID NO: 6387 - DNA, 33 bp, Homo sapiens
aaagggaagcggaacaygatttcatggcaatca

SEQ ID NO: 6388 - DNA, 33 bp, Homo sapiens
aaagggtcaaaccttayagtgctctcatatcct

SEQ ID NO: 6389 - DNA, 33 bp, Homo sapiens
aaaggtggaaacagccsaaattgatggaagaat

SEQ ID NO: 6390 - DNA, 33 bp, Homo sapiens
aaagtttttctactcartgaactgtaaactcat

SEQ ID NO: 6391 - DNA, 33 bp, Homo sapiens
aaatagctacaaattcrcatgctttggcttttg

SEQ ID NO: 6392 - DNA, 33 bp, Homo sapiens
aaatcactatggttaasaacttagtaccccctg

SEQ ID NO: 6393 - DNA, 33 bp, Homo sapiens
aaatcagcattcatgcrctgtcttagattgtag

SEQ ID NO: 6394 - DNA, 33 bp, Homo sapiens
aaatcgtcatgaaagcratcaaaagtatctcat

SEQ ID NO: 6395 - DNA, 33 bp, Homo sapiens
aaatctttacctgtccmaacattgcaaaggcat

SEQ ID NO: 6396 - DNA, 33 bp, Homo sapiens
aaatgaaaaggtatgarcaatgttgaaaaaaat

SEQ ID NO: 6397 - DNA, 33 bp, Homo sapiens
aaatggcaggaaagaaygcaatggataaatgta

SEQ ID NO: 6398 - DNA, 33 bp, Homo sapiens
aaatgtagagaaaaacratccaggaaggagaag

SEQ ID NO: 6399 - DNA, 33 bp, Homo sapiens
aaattctcccaatatcyccagttcagtttcctg

SEQ ID NO: 6400 - DNA, 33 bp, Homo sapiens
aacaacacaaaaggcaraacaatgttatgctta

SEQ ID NO: 6401 - DNA, 33 bp, Homo sapiens
aacaacatgtaaacacrgtcattggagtgatat

SEQ ID NO: 6402 - DNA, 33 bp, Homo sapiens
aacaactgctcaagaaygatgttaacaaaaatt

SEQ ID NO: 6403 - DNA, 33 bp, Homo sapiens
aacaaggttgtgaaaaragtgaaaatctgccaa

SEQ ID NO: 6404 - DNA, 33 bp, Homo sapiens
aacactgaggatgtaayggagttttcacaagtt

SEQ ID NO: 6405 - DNA, 33 bp, Homo sapiens
aacagagtctccgtcastcagaagctagaggca

SEQ ID NO: 6406 - DNA, 33 bp, Homo sapiens
aacagtaaagcaacaaygcagtaaaaatgaaaa

SEQ ID NO: 6407 - DNA, 33 bp, Homo sapiens
aacattcagtttccaaygaatttcatacacaga

SEQ ID NO: 6408 - DNA, 33 bp, Homo sapiens
aaccaacaaatctgaaycagaccttaaactatg

SEQ ID NO: 6409 - DNA, 33 bp, Homo sapiens
aaccagacgtcgaaggmaggatagtatttgaat

SEQ ID NO: 6410 - DNA, 33 bp, Homo sapiens
aaccagccactggacamcttcagacacagaaca

SEQ ID NO: 6411 - DNA, 33 bp, Homo sapiens
aacccagattctggcayataacagacccttgct

SEQ ID NO: 6412 - DNA, 33 bp, Homo sapiens
aacctctcaactctaaycaattagcttttctta

SEQ ID NO: 6413 - DNA, 33 bp, Homo sapiens
tgcattgttgtaattcrcatcatgtttgcatct

SEQ ID NO: 6414 - DNA, 33 bp, Homo sapiens
aactaaaagctttgtayaacgcgtgctgctatg

SEQ ID NO: 6415 - DNA, 33 bp, Homo sapiens
aactaactccacagaakaaataaaatggctcat

SEQ ID NO: 6416 - DNA, 33 bp, Homo sapiens
aactaaggttatttgakaattcctgggccactg

SEQ ID NO: 6417 - DNA, 33 bp, Homo sapiens
aactactgtgagtccawgccctaagtcctatca

SEQ ID NO: 6418 - DNA, 33 bp, Homo sapiens
aactgacagaattttayggagaaatgaagaaaa

SEQ ID NO: 6419 - DNA, 33 bp, Homo sapiens
aactgcagtcccttgcrgatcgaggtttctggt

SEQ ID NO: 6420 - DNA, 33 bp, Homo sapiens
aacttgggaagtgatayggagagagatgacctt

SEQ ID NO: 6421 - DNA, 33 bp, Homo sapiens
ataatagcatttgaaargctcattaaatagaac

SEQ ID NO: 6422 - DNA, 33 bp, Homo sapiens
aactttcctcaacagakaataataggcaatcat

SEQ ID NO: 6423 - DNA, 33 bp, Homo sapiens
aagaaataaacaggtamaagctcataaaaatag

SEQ ID NO: 6424 - DNA, 33 bp, Homo sapiens
aagagacaagagtgaayatggactatggtgacc

SEQ ID NO: 6425 - DNA, 33 bp, Homo sapiens
aagagagagagggggawggtattatgttctttt

SEQ ID NO: 6426 - DNA, 33 bp, Homo sapiens
aagagaggattgatacrggcctcatgttcttgc

SEQ ID NO: 6427 - DNA, 33 bp, Homo sapiens
aagcaaggagctccaaraaccttcacacttgaa

SEQ ID NO: 6428 - DNA, 33 bp, Homo sapiens
aagcatgtctcttaccygcttcacagactttat

SEQ ID NO: 6429 - DNA, 33 bp, Homo sapiens
aagccaagaacctgacygtattcagcctccaac

SEQ ID NO: 6430 - DNA, 33 bp, Homo sapiens
aagccctctgcaacctkacttcagtctacattt

SEQ ID NO: 6431 - DNA, 33 bp, Homo sapiens
aagctacatttgtgaastgaggttggtaattgc

SEQ ID NO: 6432 - DNA, 33 bp, Homo sapiens
tttatccttcatttgcrctcatgctctttgttt

SEQ ID NO: 6433 - DNA, 33 bp, Homo sapiens
aaggacagaagggaccrgaccgctggatgcaac

SEQ ID NO: 6434 - DNA, 33 bp, Homo sapiens
aaggagagacgaacaaygacaaaacctcagaga

SEQ ID NO: 6435 - DNA, 33 bp, Homo sapiens
aaggcagtggctggcasgattaaataaaggcta

SEQ ID NO: 6436 - DNA, 33 bp, Homo sapiens
aaggctgaagaaattcygaaagacctatagcgt

SEQ ID NO: 6437 - DNA, 33 bp, Homo sapiens
aagggcatcagtggaarcgtatggaaagtttat

SEQ ID NO: 6438 - DNA, 33 bp, Homo sapiens
aagggtcagtaagtagragtaacagaggcaatg

SEQ ID NO: 6439 - DNA, 33 bp, Homo sapiens
aaggtagacagagagaygcgtgtgaaaaagagc

SEQ ID NO: 6440 - DNA, 33 bp, Homo sapiens
aaggtagtctgggatcraacaagggaatagaag

SEQ ID NO: 6441 - DNA, 33 bp, Homo sapiens
aaggtatcctgagtctyaccgtatctgctccat

SEQ ID NO: 6442 - DNA, 33 bp, Homo sapiens
aaggtctccttggccartaagagtctgttcagt

SEQ ID NO: 6443 - DNA, 33 bp, Homo sapiens
aaggtgatgaagagcayggagtaaataaagaag

SEQ ID NO: 6444 - DNA, 33 bp, Homo sapiens
aagtaggtagatttgaygatggaaaaagaaggg

SEQ ID NO: 6445 - DNA, 33 bp, Homo sapiens
aagtcagattgtgaaamctttgcttcaacagtc

SEQ ID NO: 6446 - DNA, 33 bp, Homo sapiens
aagtgatcactttcaaytcaagaatgacttata

SEQ ID NO: 6447 - DNA, 33 bp, Homo sapiens
aataaaagaatgttatraagcttcagatgtcat

SEQ ID NO: 6448 - DNA, 33 bp, Homo sapiens
agtgtaaaaatatgacrgtacatacgtatgaaa

SEQ ID NO: 6449 - DNA, 33 bp, Homo sapiens
aataacacagactcaartacagcgaataacttt

SEQ ID NO: 6450 - DNA, 33 bp, Homo sapiens
aataagagggtactcaytgaaatcacaggattg

SEQ ID NO: 6451 - DNA, 33 bp, Homo sapiens
aataatgtatgctacarcacaaagcatttatat

SEQ ID NO: 6452 - DNA, 33 bp, Homo sapiens
aatagaaaatcttttascaactgcgccataaat

SEQ ID NO: 6453 - DNA, 33 bp, Homo sapiens
aatagcacttgaataaytccctctgatgtgttc

SEQ ID NO: 6454 - DNA, 33 bp, Homo sapiens
aatcatactttaagccyatccccttacctgttt

SEQ ID NO: 6455 - DNA, 33 bp, Homo sapiens
aatccagatcagcttaygttttagatgctagga

SEQ ID NO: 6456 - DNA, 33 bp, Homo sapiens
aatccatcattctgtaygttcagcctatctcct

SEQ ID NO: 6457 - DNA, 33 bp, Homo sapiens
aatcgactggacgaagscttcatgaatgatcca

SEQ ID NO: 6458 - DNA, 33 bp, Homo sapiens
aatctcaggcatagtgrataaaactcattccag

SEQ ID NO: 6459 - DNA, 33 bp, Homo sapiens
aatctgggtaacagaasagaatgcctgagcctc

SEQ ID NO: 6460 - DNA, 33 bp, Homo sapiens
aatgaatactaatgacracatggatgcatctca

SEQ ID NO: 6461 - DNA, 33 bp, Homo sapiens
aatgacaaccttgcatyaagacagcgtttctac

SEQ ID NO: 6462 - DNA, 33 bp, Homo sapiens
aatgggatttaagaggycatctaaccaaagtct

SEQ ID NO: 6463 - DNA, 33 bp, Homo sapiens
aatgtcttgtggtctawtaccctttaatttcca

SEQ ID NO: 6464 - DNA, 33 bp, Homo sapiens
tcctgagcatctctcayatctgggtgataagag

SEQ ID NO: 6465 - DNA, 33 bp, Homo sapiens
aattatgacattacaamagttaggccatatctg

SEQ ID NO: 6466 - DNA, 33 bp, Homo sapiens
aattattcaccaaataygactaaggaaagttac

SEQ ID NO: 6467 - DNA, 33 bp, Homo sapiens
aggatttgagtagcaawcaccttctttttgtct

SEQ ID NO: 6468 - DNA, 33 bp, Homo sapiens
aattcataagcttagayatagaaggggtaccat

SEQ ID NO: 6469 - DNA, 33 bp, Homo sapiens
aattctcattgtatcayatcatcacactcagaa

SEQ ID NO: 6470 - DNA, 33 bp, Homo sapiens
aattctttgaaacctcragtcttttccctcttg

SEQ ID NO: 6471 - DNA, 33 bp, Homo sapiens
aattgacgtaaatagcwgatagtacattttatt

SEQ ID NO: 6472 - DNA, 33 bp, Homo sapiens
aattgcatgccattccragtagtgtaatgaaat

SEQ ID NO: 6473 - DNA, 33 bp, Homo sapiens
aattggattatttgggwataggccacaatctgg

SEQ ID NO: 6474 - DNA, 33 bp, Homo sapiens
aatttcacaagttcctwaagctcactgagtcct

SEQ ID NO: 6475 - DNA, 33 bp, Homo sapiens
aatttcatttcggatgyaggtctcctttgcaaa

SEQ ID NO: 6476 - DNA, 33 bp, Homo sapiens
aatttggacaaggtcartgaacgtccttgagcc

SEQ ID NO: 6477 - DNA, 33 bp, Homo sapiens
aatttttaagtcttccyagatgctactaatgtg

SEQ ID NO: 6478 - DNA, 33 bp, Homo sapiens
aagaaaagcaagtcaawttaatcaatccccttc

SEQ ID NO: 6479 - DNA, 33 bp, Homo sapiens
acaaagacaccaataaygcacaatgggaaaatt

SEQ ID NO: 6480 - DNA, 33 bp, Homo sapiens
acaaagtcaggggacayatttagcaggatcttt

SEQ ID NO: 6481 - DNA, 33 bp, Homo sapiens
acaaagtgctaggtgayagtgaggccaaggaaa

SEQ ID NO: 6482 - DNA, 33 bp, Homo sapiens
acaaatcaatctgtaayaggcaagaagatctac

SEQ ID NO: 6483 - DNA, 33 bp, Homo sapiens
acaactaaaggcaatakcacgtaaaataggatt

SEQ ID NO: 6484 - DNA, 33 bp, Homo sapiens
acaagctatttgctaaygtggttgtgccatttt

SEQ ID NO: 6485 - DNA, 33 bp, Homo sapiens
acaatccaaaatcatayactcggccgggtgcag

SEQ ID NO: 6486 - DNA, 33 bp, Homo sapiens
acaattctaagggttcsaaaatgaattgtgtgg

SEQ ID NO: 6487 - DNA, 33 bp, Homo sapiens
acacacatatctaatcrcacccatttttgtctt

SEQ ID NO: 6488 - DNA, 33 bp, Homo sapiens
acacacatgaccactaygctgtttgctgaggga

SEQ ID NO: 6489 - DNA, 33 bp, Homo sapiens
acacagcctaataaccwgaaccaattgagaaaa

SEQ ID NO: 6490 - DNA, 33 bp, Homo sapiens
acacagggattcgaaayggatcgcctcactgtg

SEQ ID NO: 6491 - DNA, 33 bp, Homo sapiens
acaccaattcatataayggagtgctagacagct

SEQ ID NO: 6492 - DNA, 33 bp, Homo sapiens
acacttcagagtgaccyaaaactagaaaactgg

SEQ ID NO: 6493 - DNA, 33 bp, Homo sapiens
acagaatgtggaattayctggtggctatcgtcc

SEQ ID NO: 6494 - DNA, 33 bp, Homo sapiens
acagagtagccataatraactaaatactagcta

SEQ ID NO: 6495 - DNA, 33 bp, Homo sapiens
acagataaccactgtcrcttatataggttctct

SEQ ID NO: 6496 - DNA, 33 bp, Homo sapiens
acagcaggtacacatayggctcttcgggaatcg

SEQ ID NO: 6497 - DNA, 33 bp, Homo sapiens
acagtaacaacctttcrcagtgcagcccggctg

SEQ ID NO: 6498 - DNA, 33 bp, Homo sapiens
acagtagctttgggaaygttgagaacaggaagc

SEQ ID NO: 6499 - DNA, 33 bp, Homo sapiens
acagtgtttttattggyatctgaaagcatctgg

SEQ ID NO: 6500 - DNA, 33 bp, Homo sapiens
acagttaggatagtcarggaagtatggtactgg

SEQ ID NO: 6501 - DNA, 33 bp, Homo sapiens
acagttctcctgactcrattctatttcctctct

SEQ ID NO: 6502 - DNA, 33 bp, Homo sapiens
acagttttcaaatgacygtcactagtgttcctg

SEQ ID NO: 6503 - DNA, 33 bp, Homo sapiens
acatatagctagtgcayaacggaagttagctct

SEQ ID NO: 6504 - DNA, 33 bp, Homo sapiens
tacgttacttagcttgratacataataagaatt

SEQ ID NO: 6505 - DNA, 33 bp, Homo sapiens
acatgctgagatttctwaaaaagtgggccttta

SEQ ID NO: 6506 - DNA, 33 bp, Homo sapiens
acatggtcatatctaayatcaaccgggtgtaga

SEQ ID NO: 6507 - DNA, 33 bp, Homo sapiens
acatttgtgaatatcarctctgttcttggcatc

SEQ ID NO: 6508 - DNA, 33 bp, Homo sapiens
accaaccaattctccawtgccacctgggtgccc

SEQ ID NO: 6509 - DNA, 33 bp, Homo sapiens
accatacaacttagaaytcaactacacttgaac

SEQ ID NO: 6510 - DNA, 33 bp, Homo sapiens
accattgcttagagaarctgtcatcactcctgc

SEQ ID NO: 6511 - DNA, 33 bp, Homo sapiens
acccaatgctcttcaayttatgaatggataaac

SEQ ID NO: 6512 - DNA, 33 bp, Homo sapiens
acccagactcctgaccrgcaaaaaccgcgagat

SEQ ID NO: 6513 - DNA, 33 bp, Homo sapiens
acccctgcgtctttaaygtagatgcctaaactg

SEQ ID NO: 6514 - DNA, 33 bp, Homo sapiens
accctcaagtttatgawctgggcttgccaatga

SEQ ID NO: 6515 - DNA, 33 bp, Homo sapiens
acctacagagaatctamggaatcaagtgcatta

SEQ ID NO: 6516 - DNA, 33 bp, Homo sapiens
acctactacttttccayacagagtcaatcaaat

SEQ ID NO: 6517 - DNA, 33 bp, Homo sapiens
acctcttagcataccartaaaacacattttgtt

SEQ ID NO: 6518 - DNA, 33 bp, Homo sapiens
acctgcctgggtccacrcctcatcgtctacact

SEQ ID NO: 6519 - DNA, 33 bp, Homo sapiens
acctggaaacatatgascttttagtgtatgatg

SEQ ID NO: 6520 - DNA, 33 bp, Homo sapiens
acctttatacctcagtyaagtgcagatgaataa

SEQ ID NO: 6521 - DNA, 33 bp, Homo sapiens
acgtgcatgtgaaataktaagaacgcgctgatg

SEQ ID NO: 6522 - DNA, 33 bp, Homo sapiens
actaaaactctcagaamtctcccatcaattttg

SEQ ID NO: 6523 - DNA, 33 bp, Homo sapiens
actaattcatactttcrccaatggagtataaat

SEQ ID NO: 6524 - DNA, 33 bp, Homo sapiens
actacaattgtctgctraacaaactacagagga

SEQ ID NO: 6525 - DNA, 33 bp, Homo sapiens
actaccgacttggagakgaaaaatagctttgtc

SEQ ID NO: 6526 - DNA, 33 bp, Homo sapiens
actacctttctgttgayggattgatgagactga

SEQ ID NO: 6527 - DNA, 33 bp, Homo sapiens
actactatgaaaagacygcacgtgacagaattg

SEQ ID NO: 6528 - DNA, 33 bp, Homo sapiens
actataatctcattgayggcagctgtattagtc

SEQ ID NO: 6529 - DNA, 33 bp, Homo sapiens
actccaaatggttcaartaagacttccaatacc

SEQ ID NO: 6530 - DNA, 33 bp, Homo sapiens
actccatagaaagccaygtgaagcttttcataa

SEQ ID NO: 6531 - DNA, 33 bp, Homo sapiens
actcccctgcatggatyatatcagctgataagc

SEQ ID NO: 6532 - DNA, 33 bp, Homo sapiens
actctgagaaggactckgaagaggtgacacgag

SEQ ID NO: 6533 - DNA, 33 bp, Homo sapiens
actctgtgatctcggaygataatttaattatgg

SEQ ID NO: 6534 - DNA, 33 bp, Homo sapiens
actcttaacatagcaamccaagaggtaggcgtt

SEQ ID NO: 6535 - DNA, 33 bp, Homo sapiens
actgagaacttctaatracatcacacttaaagc

SEQ ID NO: 6536 - DNA, 33 bp, Homo sapiens
actgagggatggcctcrctcaaaatggtggtct

SEQ ID NO: 6537 - DNA, 33 bp, Homo sapiens
actgagtggaatatagwcaggttaattgcccta

SEQ ID NO: 6538 - DNA, 33 bp, Homo sapiens
actgatgattttctccragaagctctccttttc

SEQ ID NO: 6539 - DNA, 33 bp, Homo sapiens
actgatgtgttttctcragatgcatatggaaag

SEQ ID NO: 6540 - DNA, 33 bp, Homo sapiens
actgcaaggatgacaaygggttgtgtaaggtgg

SEQ ID NO: 6541 - DNA, 33 bp, Homo sapiens
actgctgttgctgatayccccttccttttgctc

SEQ ID NO: 6542 - DNA, 33 bp, Homo sapiens
actggaaacgctgaagrattttattttatttta

SEQ ID NO: 6543 - DNA, 33 bp, Homo sapiens
actggactaagtcacamaacagttcagtcatat

SEQ ID NO: 6544 - DNA, 33 bp, Homo sapiens
actggatctgggggtaygtggccagacacaccc

SEQ ID NO: 6545 - DNA, 33 bp, Homo sapiens
actgtgaagttttccasaagctaagtgacaagt

SEQ ID NO: 6546 - DNA, 33 bp, Homo sapiens
actgtgcctgacttggratggatgacttggaga

SEQ ID NO: 6547 - DNA, 33 bp, Homo sapiens
actgttggtgtgaagaygtaattgacagtcata

SEQ ID NO: 6548 - DNA, 33 bp, Homo sapiens
actgtttgcttttttamaatcatgtggacacaa

SEQ ID NO: 6549 - DNA, 33 bp, Homo sapiens
acttctcaagcaggtawgcgttatctcctcaac

SEQ ID NO: 6550 - DNA, 33 bp, Homo sapiens
acttgaggctacataargaagtacaaaaatgta

SEQ ID NO: 6551 - DNA, 33 bp, Homo sapiens
acttgataggttttacrgacttgctatacattg

SEQ ID NO: 6552 - DNA, 33 bp, Homo sapiens
acttggagcccagtaayggaagatttttatgat

SEQ ID NO: 6553 - DNA, 33 bp, Homo sapiens
acttggctgattataasaatatctttacccaga

SEQ ID NO: 6554 - DNA, 33 bp, Homo sapiens
acttgttaaaaggaaartatcatctccacaaat

SEQ ID NO: 6555 - DNA, 33 bp, Homo sapiens
actttattgtggtaacrctttcatccaaatata

SEQ ID NO: 6556 - DNA, 33 bp, Homo sapiens
actttcaaatagaaaaygaaactgggcatctct

SEQ ID NO: 6557 - DNA, 33 bp, Homo sapiens
agaaaagaaatgttcaygtaattgagtatctaa

SEQ ID NO: 6558 - DNA, 33 bp, Homo sapiens
agaaaagaatccattamgtttagcaactgaagc

SEQ ID NO: 6559 - DNA, 33 bp, Homo sapiens
agaaagctatgtctgartattggagtgataaag

SEQ ID NO: 6560 - DNA, 33 bp, Homo sapiens
agaaatcaggttgtacmctaataggacgatcac

SEQ ID NO: 6561 - DNA, 33 bp, Homo sapiens
agaacacaacacatgargcaattgggccaccat

SEQ ID NO: 6562 - DNA, 33 bp, Homo sapiens
actgtgtaagccttcakacattgagtccaatca

SEQ ID NO: 6563 - DNA, 33 bp, Homo sapiens
agaagcaagaccaaaamttaggctcccaatttt

SEQ ID NO: 6564 - DNA, 33 bp, Homo sapiens
agaatctcaaatgatgycacaaggaccctgtcc

SEQ ID NO: 6565 - DNA, 33 bp, Homo sapiens
agacacgctccagggasgtttctataaagtggc

SEQ ID NO: 6566 - DNA, 33 bp, Homo sapiens
agactgaccactctgcragaaaaaaatggtacc

SEQ ID NO: 6567 - DNA, 33 bp, Homo sapiens
agacttttgcttcatgycacttatgaacatatt

SEQ ID NO: 6568 - DNA, 33 bp, Homo sapiens
agagaaaacagtatcartagaagtctggagtgc

SEQ ID NO: 6569 - DNA, 33 bp, Homo sapiens
agagaacctggttcaarctcaattgcaatcttt

SEQ ID NO: 6570 - DNA, 33 bp, Homo sapiens
agagagtcactcaggartacctagagttggttt

SEQ ID NO: 6571 - DNA, 33 bp, Homo sapiens
agagcctagcatctacygatcactcacaagatg

SEQ ID NO: 6572 - DNA, 33 bp, Homo sapiens
agagctaacatacctgrcaacccggtaaataaa

SEQ ID NO: 6573 - DNA, 33 bp, Homo sapiens
agaggaaaatccatgcraagtcacagcaagaag

SEQ ID NO: 6574 - DNA, 33 bp, Homo sapiens
agaggaaataaaataarcagttctgtggtgaag

SEQ ID NO: 6575 - DNA, 33 bp, Homo sapiens
agagtaataactgggaygataaaaggaagataa

SEQ ID NO: 6576 - DNA, 33 bp, Homo sapiens
agagtatgatgattgayggaccattgcatattc

SEQ ID NO: 6577 - DNA, 33 bp, Homo sapiens
agagtcaatgtgaaagkctattcaacgcactcc

SEQ ID NO: 6578 - DNA, 33 bp, Homo sapiens
agagtcatagaacaagrcacatgggagtatggt

SEQ ID NO: 6579 - DNA, 33 bp, Homo sapiens
agatacattagttccayctgaaaaggcaagata

SEQ ID NO: 6580 - DNA, 33 bp, Homo sapiens
atgactgcacaaagatrctaataacaaacagag

SEQ ID NO: 6581 - DNA, 33 bp, Homo sapiens
agatatgggtgtgtcartcctccgtggcgcact

SEQ ID NO: 6582 - DNA, 33 bp, Homo sapiens
agatattgatgacttcygaacggcacaaaaaga

SEQ ID NO: 6583 - DNA, 33 bp, Homo sapiens
agatcaaattgggaaamattgacttcttaacaa

SEQ ID NO: 6584 - DNA, 33 bp, Homo sapiens
agatcgatataaaagayggtaacggccgggcgc

SEQ ID NO: 6585 - DNA, 33 bp, Homo sapiens
agatctagggctgccaygaatggttgtgtagtg

SEQ ID NO: 6586 - DNA, 33 bp, Homo sapiens
agatgaacattgcaagyagatgaacaggtgaac

SEQ ID NO: 6587 - DNA, 33 bp, Homo sapiens
agatgggttttggccakggaagtgacataatct

SEQ ID NO: 6588 - DNA, 33 bp, Homo sapiens
agatggtacaagtgtaraattgactgttagtac

SEQ ID NO: 6589 - DNA, 33 bp, Homo sapiens
agatggtcatcttgtayagtctcactggaattc

SEQ ID NO: 6590 - DNA, 33 bp, Homo sapiens
agattcctgcctgaaaragggtgacatctgtcc

SEQ ID NO: 6591 - DNA, 33 bp, Homo sapiens
agattggcctactctgratatgtcctataaatg

SEQ ID NO: 6592 - DNA, 33 bp, Homo sapiens
agatttacatggaagaygaagcaactgattcac

SEQ ID NO: 6593 - DNA, 33 bp, Homo sapiens
agcaaactctattaacygaatcttgtttctggc

SEQ ID NO: 6594 - DNA, 33 bp, Homo sapiens
agcaataccaaatgtgraacaaatcccagtggt

SEQ ID NO: 6595 - DNA, 33 bp, Homo sapiens
agcacaggcctagctaytacttgaagaagcccc

SEQ ID NO: 6596 - DNA, 33 bp, Homo sapiens
agcaccatttaaaaacrctattttattgctgtg

SEQ ID NO: 6597 - DNA, 33 bp, Homo sapiens
agcacttcccgtcctasagtagaccatcccttg

SEQ ID NO: 6598 - DNA, 33 bp, Homo sapiens
agccacatctgggcaayagaagtgcgccaaaag

SEQ ID NO: 6599 - DNA, 33 bp, Homo sapiens
agccacgtacctatgcrctcacatctaacaagt

SEQ ID NO: 6600 - DNA, 33 bp, Homo sapiens
agccattaagaaattaygagttgaagattagct

SEQ ID NO: 6601 - DNA, 33 bp, Homo sapiens
agccttcaaataagaasattgagaagagttggg

SEQ ID NO: 6602 - DNA, 33 bp, Homo sapiens
agcgatcacgtaccgastattgacttggctcag

SEQ ID NO: 6603 - DNA, 33 bp, Homo sapiens
agctacaggagaaggaycagcggccatgagagt

SEQ ID NO: 6604 - DNA, 33 bp, Homo sapiens
agctgcttcctgcagayagactagactcctttc

SEQ ID NO: 6605 - DNA, 33 bp, Homo sapiens
agcttctattctcccaygttgagcttcagagac

SEQ ID NO: 6606 - DNA, 33 bp, Homo sapiens
aggaaaactgtccattsaagaaaaggtcaattt

SEQ ID NO: 6607 - DNA, 33 bp, Homo sapiens
aggaacagagggttccyccccaacagtgagcat

SEQ ID NO: 6608 - DNA, 33 bp, Homo sapiens
aggaatcattgttacamgaaagttctggtttgg

SEQ ID NO: 6609 - DNA, 33 bp, Homo sapiens
aggacctcagacatacrgagaatgaagaggaca

SEQ ID NO: 6610 - DNA, 33 bp, Homo sapiens
aggactttcagccatcsccttagactcaaacaa

SEQ ID NO: 6611 - DNA, 33 bp, Homo sapiens
aggagctcatctaggargagagtacaggtaaca

SEQ ID NO: 6612 - DNA, 33 bp, Homo sapiens
aggagctctcacataaygaatgaagaacttgaa

SEQ ID NO: 6613 - DNA, 33 bp, Homo sapiens
aggattcagctgtccamgtcaactcaaataatc

SEQ ID NO: 6614 - DNA, 33 bp, Homo sapiens
aggatttgggcagaaaytaactctgcgattgaa

SEQ ID NO: 6615 - DNA, 33 bp, Homo sapiens
aggcaaagattgtgcaygttgaactggaatgag

SEQ ID NO: 6616 - DNA, 33 bp, Homo sapiens
aggcaactcgcaaagawgagatggaagaaggca

SEQ ID NO: 6617 - DNA, 33 bp, Homo sapiens
aggcaggtgctatttcyaccaggactcataaaa

SEQ ID NO: 6618 - DNA, 33 bp, Homo sapiens
caacatttcacatctgyagttaacttgaagcag

SEQ ID NO: 6619 - DNA, 33 bp, Homo sapiens
aggccccaaaagtgaaygctttctgtgaatatt

SEQ ID NO: 6620 - DNA, 33 bp, Homo sapiens
aggctaagagactgagsattcttattcaaaaga

SEQ ID NO: 6621 - DNA, 33 bp, Homo sapiens
aggctaagcttcctgakagttacttcaatcata

SEQ ID NO: 6622 - DNA, 33 bp, Homo sapiens
aggctcagaaaatctartaaatctgtctgaggc

SEQ ID NO: 6623 - DNA, 33 bp, Homo sapiens
aggctggaaagaaacayatttgctcccctgtct

SEQ ID NO: 6624 - DNA, 33 bp, Homo sapiens
aggcttagacttgcacyaaggctccatcaggcc

SEQ ID NO: 6625 - DNA, 33 bp, Homo sapiens
agggaagtaccaaacartagaaccacgctctaa

SEQ ID NO: 6626 - DNA, 33 bp, Homo sapiens
agggagacttctgagtsacgactttccatgctt

SEQ ID NO: 6627 - DNA, 33 bp, Homo sapiens
agggcttaattaaataygtggttggtgaagatt

SEQ ID NO: 6628 - DNA, 33 bp, Homo sapiens
agggtcagtttatgtaygtaaattggtcattcc

SEQ ID NO: 6629 - DNA, 33 bp, Homo sapiens
aggtatgagatgcttarccaagattttatgatt

SEQ ID NO: 6630 - DNA, 33 bp, Homo sapiens
aggtatggtagcacaakactggttgttctgtac

SEQ ID NO: 6631 - DNA, 33 bp, Homo sapiens
aggtctcatggaggtarccagatattttccatt

SEQ ID NO: 6632 - DNA, 33 bp, Homo sapiens
aggtctgtagcctgacrgacagtttctcttctc

SEQ ID NO: 6633 - DNA, 33 bp, Homo sapiens
aggtgacctgtgaaaayagactccttccagtga

SEQ ID NO: 6634 - DNA, 33 bp, Homo sapiens
aggtggtttgccgagcrccagactgttgtagca

SEQ ID NO: 6635 - DNA, 33 bp, Homo sapiens
aggtttgtagttgttayggcagtgctaagaaac

SEQ ID NO: 6636 - DNA, 33 bp, Homo sapiens
agtaatagcagcaagawggatgaggatgttgaa

SEQ ID NO: 6637 - DNA, 33 bp, Homo sapiens
agtaccatctaagccaygtaagtattaacactt

SEQ ID NO: 6638 - DNA, 33 bp, Homo sapiens
agtagaatttaagagcrcaagaatcatattaga

SEQ ID NO: 6639 - DNA, 33 bp, Homo sapiens
agtagcttaaaacaatratcaccatgaaaaaag

SEQ ID NO: 6640 - DNA, 33 bp, Homo sapiens
agtatctggaatctacraggatctcaaacatat

SEQ ID NO: 6641 - DNA, 33 bp, Homo sapiens
agtatttatttgcctcrcatttatgtcacatga

SEQ ID NO: 6642 - DNA, 33 bp, Homo sapiens
agtcactaaggaaaaartcagagatactaggag

SEQ ID NO: 6643 - DNA, 33 bp, Homo sapiens
agtccaataggtataawctgtctctggttgtac

SEQ ID NO: 6644 - DNA, 33 bp, Homo sapiens
agtcccaaaggttcagraactggggctgaagag

SEQ ID NO: 6645 - DNA, 33 bp, Homo sapiens
agtcccagtgaaaggayaggtggaaatatttct

SEQ ID NO: 6646 - DNA, 33 bp, Homo sapiens
agtctgaagaagataaygtcatcatggcttaat

SEQ ID NO: 6647 - DNA, 33 bp, Homo sapiens
agtctttcaatcaatcrccttccttatccatcc

SEQ ID NO: 6648 - DNA, 33 bp, Homo sapiens
agtgactgaaggagccrgagtagactatacaag

SEQ ID NO: 6649 - DNA, 33 bp, Homo sapiens
agtgggatattattcartcgtgagaaggaatga

SEQ ID NO: 6650 - DNA, 33 bp, Homo sapiens
agtgtgcacttcaaaakgacgtttggagatgaa

SEQ ID NO: 6651 - DNA, 33 bp, Homo sapiens
agtgttctctgccaggratatgatatggtttgg

SEQ ID NO: 6652 - DNA, 33 bp, Homo sapiens
agttattttctggcccyaaaagtctaactcatg

SEQ ID NO: 6653 - DNA, 33 bp, Homo sapiens
agttcagcttgatgtakaacaggcctctgaaag

SEQ ID NO: 6654 - DNA, 33 bp, Homo sapiens
agttgttattagctacrgaaaacatcacaaaat

SEQ ID NO: 6655 - DNA, 33 bp, Homo sapiens
agttttcttagccacastggagaaagttacgga

SEQ ID NO: 6656 - DNA, 33 bp, Homo sapiens
ataaaacctttgtacaytgggaagaattagaaa

SEQ ID NO: 6657 - DNA, 33 bp, Homo sapiens
ataaacaaatcactggraatgctgcacaggtac

SEQ ID NO: 6658 - DNA, 33 bp, Homo sapiens
ataaagcagatgctaaygttctgtcccttttat

SEQ ID NO: 6659 - DNA, 33 bp, Homo sapiens
ataaatagcactgggayaagtatcaacaccatt

SEQ ID NO: 6660 - DNA, 33 bp, Homo sapiens
ataactatatgtttctkaagtctctattgacag

SEQ ID NO: 6661 - DNA, 33 bp, Homo sapiens
ataatgagttctgaagragagagacagggatga

SEQ ID NO: 6662 - DNA, 33 bp, Homo sapiens
atacataaaattgttgyacaaggcatatgctga

SEQ ID NO: 6663 - DNA, 33 bp, Homo sapiens
atacatattgttcctasaagtatccttagtgaa

SEQ ID NO: 6664 - DNA, 33 bp, Homo sapiens
atactctgtggaaacaratgattcagggctcct

SEQ ID NO: 6665 - DNA, 33 bp, Homo sapiens
atacttacccaagcaayaagcaaagtaccgaat

SEQ ID NO: 6666 - DNA, 33 bp, Homo sapiens
atagcattttcgttatsagggcttttgatagag

SEQ ID NO: 6667 - DNA, 33 bp, Homo sapiens
atagctccgatttcaasaaaggatgagtccaat

SEQ ID NO: 6668 - DNA, 33 bp, Homo sapiens
ataggaatacagcaaastaaaatgccacaaaag

SEQ ID NO: 6669 - DNA, 33 bp, Homo sapiens
ataggcaggaggataaraaattactgctttgct

SEQ ID NO: 6670 - DNA, 33 bp, Homo sapiens
ataggccatcacttacyacaccaatgtccacag

SEQ ID NO: 6671 - DNA, 33 bp, Homo sapiens
atagtggtgacaaagaygtttgattcacaaaga

SEQ ID NO: 6672 - DNA, 33 bp, Homo sapiens
atataactgtcaaaatragcagtatagatggta

SEQ ID NO: 6673 - DNA, 33 bp, Homo sapiens
agaattgttagcacagmaaggagaaggagtagc

SEQ ID NO: 6674 - DNA, 33 bp, Homo sapiens
atatagcatggtagtcragaggacaggtagcac

SEQ ID NO: 6675 - DNA, 33 bp, Homo sapiens
atatcatgaaaggaaayatagctgagacatttt

SEQ ID NO: 6676 - DNA, 33 bp, Homo sapiens
atatcctgatgccacaytggatagaacagcagg

SEQ ID NO: 6677 - DNA, 33 bp, Homo sapiens
atattcttgtactaaascatagctcaggaacat

SEQ ID NO: 6678 - DNA, 33 bp, Homo sapiens
atatttattcgtgaaayaggtgataaagaaaaa

SEQ ID NO: 6679 - DNA, 33 bp, Homo sapiens
atatttggttttgaagkacaagaactagaagag

SEQ ID NO: 6680 - DNA, 33 bp, Homo sapiens
atcaaatatgttttctsaccaaagggatttagg

SEQ ID NO: 6681 - DNA, 33 bp, Homo sapiens
tgtgtgcgcacattcasaatgttagaaaaaaac

SEQ ID NO: 6682 - DNA, 33 bp, Homo sapiens
atcaagataatgtcacygaaggcctctgggaaa

SEQ ID NO: 6683 - DNA, 33 bp, Homo sapiens
atcagagtaatacctgycaattattggaaagta

SEQ ID NO: 6684 - DNA, 33 bp, Homo sapiens
atcagcgaacctttgarctttgccgctggtagg

SEQ ID NO: 6685 - DNA, 33 bp, Homo sapiens
atcatttttaagtgtakgtgtacccagtatcaa

SEQ ID NO: 6686 - DNA, 33 bp, Homo sapiens
atccaggcctacagaasatgatgaacttaattg

SEQ ID NO: 6687 - DNA, 33 bp, Homo sapiens
atccatactgccagatwaaagtagtccacatgg

SEQ ID NO: 6688 - DNA, 33 bp, Homo sapiens
atcccagatgggattargcttgcaattgttgct

SEQ ID NO: 6689 - DNA, 33 bp, Homo sapiens
atcctgatggaagtacrcaatattacctgtgaa

SEQ ID NO: 6690 - DNA, 33 bp, Homo sapiens
atccttttgtcacgtgycacaatttcaagctcc

SEQ ID NO: 6691 - DNA, 33 bp, Homo sapiens
atctaacaaattatcartagccataagcaaatc

SEQ ID NO: 6692 - DNA, 33 bp, Homo sapiens
atctacaatctagttcrccagcttgcactgaat

SEQ ID NO: 6693 - DNA, 33 bp, Homo sapiens
atctagccaagcttacygatcccatccttgaag

SEQ ID NO: 6694 - DNA, 33 bp, Homo sapiens
atctgaaatgccaggaractctgccagccaggg

SEQ ID NO: 6695 - DNA, 33 bp, Homo sapiens
atcttacggaagtgcaraattattcaggggtgt

SEQ ID NO: 6696 - DNA, 33 bp, Homo sapiens
atcttagtatggtggartaagaattgagactga

SEQ ID NO: 6697 - DNA, 33 bp, Homo sapiens
atgaaagggcaaagagkcctccggttttccaca

SEQ ID NO: 6698 - DNA, 33 bp, Homo sapiens
taaattcctctgtgatkagtcgtattatttttt

SEQ ID NO: 6699 - DNA, 33 bp, Homo sapiens
atgaagaaaactgtaaktcacgtgctccatagc

SEQ ID NO: 6700 - DNA, 33 bp, Homo sapiens
atgaagggaagcacaartaagtatagctttgga

SEQ ID NO: 6701 - DNA, 33 bp, Homo sapiens
atgagataagaaaaaakcattaactgccttgac

SEQ ID NO: 6702 - DNA, 33 bp, Homo sapiens
atgatcaaagatggctyactcttttaagtcaaa

SEQ ID NO: 6703 - DNA, 33 bp, Homo sapiens
atgatgactgcaggcasagaataaagctggtga

SEQ ID NO: 6704 - DNA, 33 bp, Homo sapiens
atgattccctgaagacygcttcttagaaatgac

SEQ ID NO: 6705 - DNA, 33 bp, Homo sapiens
atgcacaaaacaatagraggaagcaataatgtc

SEQ ID NO: 6706 - DNA, 33 bp, Homo sapiens
atgcacttacatgaaaraatttccacatgtact

SEQ ID NO: 6707 - DNA, 33 bp, Homo sapiens
atgcagaaagagtaaasatagcaggtgtgagac

SEQ ID NO: 6708 - DNA, 33 bp, Homo sapiens
atgccactccacttacscattcaacaataaact

SEQ ID NO: 6709 - DNA, 33 bp, Homo sapiens
atgctcaagtttattgrcaaaatgcccaccaga

SEQ ID NO: 6710 - DNA, 33 bp, Homo sapiens
atggagagacacagagmagcaagaatttcgcca

SEQ ID NO: 6711 - DNA, 33 bp, Homo sapiens
atggagcgacgcagaaygagcgcaccttgagga

SEQ ID NO: 6712 - DNA, 33 bp, Homo sapiens
atggcataataagcacygcctttgcctcactga

SEQ ID NO: 6713 - DNA, 33 bp, Homo sapiens
atggccctttcctagartcagtgtctttaactg

SEQ ID NO: 6714 - DNA, 33 bp, Homo sapiens
atggctgaccaagtgcygagcaaatgaatgtgg

SEQ ID NO: 6715 - DNA, 33 bp, Homo sapiens
atgggtaaagtgcttamagtggtgcctgacaag

SEQ ID NO: 6716 - DNA, 33 bp, Homo sapiens
atgggtgatggcaccawgttggagagatgacag

SEQ ID NO: 6717 - DNA, 33 bp, Homo sapiens
atggtctctgtcactgyagctgtggagtaagcc

SEQ ID NO: 6718 - DNA, 33 bp, Homo sapiens
atgtacaccagatctayggcttggagaccaaag

SEQ ID NO: 6719 - DNA, 33 bp, Homo sapiens
atgtagaagagatgaawttcaagcatgggtttc

SEQ ID NO: 6720 - DNA, 33 bp, Homo sapiens
atgtcctctgtacctaygtccctgcattgcttt

SEQ ID NO: 6721 - DNA, 33 bp, Homo sapiens
atgtctctgcagatcartgaaggttgtatcctt

SEQ ID NO: 6722 - DNA, 33 bp, Homo sapiens
atgtctgcatatctgaygtatggactgcagaat

SEQ ID NO: 6723 - DNA, 33 bp, Homo sapiens
atgtgggtatacatgamgtgtgtcactttctag

SEQ ID NO: 6724 - DNA, 33 bp, Homo sapiens
atgtggtaagtgtcacrgcaaataggggaactc

SEQ ID NO: 6725 - DNA, 33 bp, Homo sapiens
atgttgatgttttccartacttttttggtctcc

SEQ ID NO: 6726 - DNA, 33 bp, Homo sapiens
attaagaatttgaacamctcctaaacagcctgt

SEQ ID NO: 6727 - DNA, 33 bp, Homo sapiens
attataacaatggctasaggttctttttttcca

SEQ ID NO: 6728 - DNA, 33 bp, Homo sapiens
attatattttgagatamgcatgatttgagggta

SEQ ID NO: 6729 - DNA, 33 bp, Homo sapiens
attatcccagttttgcmgataaagaagctggag

SEQ ID NO: 6730 - DNA, 33 bp, Homo sapiens
attatcttgttgaatckaaatgtgaatgagtca

SEQ ID NO: 6731 - DNA, 33 bp, Homo sapiens
attatgcagccatagaragtcagaacactggca

SEQ ID NO: 6732 - DNA, 33 bp, Homo sapiens
attcaaactttggagarggctatttcaaattat

SEQ ID NO: 6733 - DNA, 33 bp, Homo sapiens
attcacagaattatgaycttgcttttgaggtgg

SEQ ID NO: 6734 - DNA, 33 bp, Homo sapiens
attcatttccagagatsactaaaaatcagagat

SEQ ID NO: 6735 - DNA, 33 bp, Homo sapiens
attgatttgaaatgcarctttatttggatctgt

SEQ ID NO: 6736 - DNA, 33 bp, Homo sapiens
attggcccacgtccctraagcttgaagaactcg

SEQ ID NO: 6737 - DNA, 33 bp, Homo sapiens
actgctacccctaaaayaggagaaactgacagg

SEQ ID NO: 6738 - DNA, 33 bp, Homo sapiens
attgggtaaatccctaygtgggcaccggaaata

SEQ ID NO: 6739 - DNA, 33 bp, Homo sapiens
attgtctcatgggatcratcatgtgtatatgta

SEQ ID NO: 6740 - DNA, 33 bp, Homo sapiens
attgttttaaaagccasggcagtaacttacatt

SEQ ID NO: 6741 - DNA, 33 bp, Homo sapiens
atttaagtgcctgctarctttgccactatgtct

SEQ ID NO: 6742 - DNA, 33 bp, Homo sapiens
atttaatatggttagayggattgatattcttta

SEQ ID NO: 6743 - DNA, 33 bp, Homo sapiens
atttactatgcttcacycagtgcatcagctctc

SEQ ID NO: 6744 - DNA, 33 bp, Homo sapiens
atttagctcttttgatragccttgccagaactc

SEQ ID NO: 6745 - DNA, 33 bp, Homo sapiens
tctctctgggagtgaawcattttgccagcaaca

SEQ ID NO: 6746 - DNA, 33 bp, Homo sapiens
atttcatttgatcacarcatatttttacaaatc

SEQ ID NO: 6747 - DNA, 33 bp, Homo sapiens
atttcttgacgcagacmatgtaatataaaatga

SEQ ID NO: 6748 - DNA, 33 bp, Homo sapiens
atttctttatacagcarattgcacagagtttga

SEQ ID NO: 6749 - DNA, 33 bp, Homo sapiens
atttgcttattctaccratttctcagttctaac

SEQ ID NO: 6750 - DNA, 33 bp, Homo sapiens
attttactaccactacsatcattgtaaagcaga

SEQ ID NO: 6751 - DNA, 33 bp, Homo sapiens
attttctccagccaacmgtcgtgacactgattc

SEQ ID NO: 6752 - DNA, 33 bp, Homo sapiens
attttctgagaagtggraaaaacaacagaatct

SEQ ID NO: 6753 - DNA, 33 bp, Homo sapiens
attttgtcattgtcccrccttgggtcttttcca

SEQ ID NO: 6754 - DNA, 33 bp, Homo sapiens
atttttgccagttctamaacaatacttccaaag

SEQ ID NO: 6755 - DNA, 33 bp, Homo sapiens
atttttggagaatgaaygctaaacagaagaatg

SEQ ID NO: 6756 - DNA, 33 bp, Homo sapiens
caaaaatcatccttaaygtgcttggtgggttgc

SEQ ID NO: 6757 - DNA, 33 bp, Homo sapiens
caaaatcccatggaccycttactggtaggcatg

SEQ ID NO: 6758 - DNA, 33 bp, Homo sapiens
caaaattaacttgctasatcttgactgagccag

SEQ ID NO: 6759 - DNA, 33 bp, Homo sapiens
caaacaacagtttatawgacacagagtatccct

SEQ ID NO: 6760 - DNA, 33 bp, Homo sapiens
caaaggcagatttcaamagtctataaaaacaat

SEQ ID NO: 6761 - DNA, 33 bp, Homo sapiens
caaatgctggtaactakatctgtttgcatttta

SEQ ID NO: 6762 - DNA, 33 bp, Homo sapiens
caaatgtagccacttamaacaacacacattcat

SEQ ID NO: 6763 - DNA, 33 bp, Homo sapiens
caaattgtggaaaacayctcaatattaagcttt

SEQ ID NO: 6764 - DNA, 33 bp, Homo sapiens
caacaagagctgtaacsctttaaagagtttgtg

SEQ ID NO: 6765 - DNA, 33 bp, Homo sapiens
caacagcaatgacttawcatttctatggtttct

SEQ ID NO: 6766 - DNA, 33 bp, Homo sapiens
caaccagttcataagasagtaatctaagaggaa

SEQ ID NO: 6767 - DNA, 33 bp, Homo sapiens
caactcagcatggaaakcagaatccaccagatg

SEQ ID NO: 6768 - DNA, 33 bp, Homo sapiens
caactggtctgaccaamaagagagagatatgct

SEQ ID NO: 6769 - DNA, 33 bp, Homo sapiens
caagaaagctactagarcaaatagatgaattca

SEQ ID NO: 6770 - DNA, 33 bp, Homo sapiens
caagaaatacctattamatccagcagaactaat

SEQ ID NO: 6771 - DNA, 33 bp, Homo sapiens
caagagttaagaaaggraataatggtagctgaa

SEQ ID NO: 6772 - DNA, 33 bp, Homo sapiens
caagccttcttttctargtaatagctggaagtc

SEQ ID NO: 6773 - DNA, 33 bp, Homo sapiens
caagtgttatgtgcatyactaaatctgggcggg

SEQ ID NO: 6774 - DNA, 33 bp, Homo sapiens
caataaactggtgacarctttcaaaaacatcaa

SEQ ID NO: 6775 - DNA, 33 bp, Homo sapiens
caataacctgaggatargaatgcgggcagagtt

SEQ ID NO: 6776 - DNA, 33 bp, Homo sapiens
caataaggtatcccatraaaccatctattaaac

SEQ ID NO: 6777 - DNA, 33 bp, Homo sapiens
caatctcagatccttgyaagacagccaagattc

SEQ ID NO: 6778 - DNA, 33 bp, Homo sapiens
caatggagagccattgmaggggagaaagaagca

SEQ ID NO: 6779 - DNA, 33 bp, Homo sapiens
caattctggacagacgrcctttcctgcatgagt

SEQ ID NO: 6780 - DNA, 33 bp, Homo sapiens
caatttcaatggtctaygttaaaaactcatctt

SEQ ID NO: 6781 - DNA, 33 bp, Homo sapiens
cacaaaagaatgtaccygagtctgttataacca

SEQ ID NO: 6782 - DNA, 33 bp, Homo sapiens
cacaactaacttttgcycaaaatacagatgcaa

SEQ ID NO: 6783 - DNA, 33 bp, Homo sapiens
gctattcatcaaaatargaaacataggaaggaa

SEQ ID NO: 6784 - DNA, 33 bp, Homo sapiens
cacacacacacacagaygattgtggactcctct

SEQ ID NO: 6785 - DNA, 33 bp, Homo sapiens
cacacagggctgagaaytgttgtatattctgcc

SEQ ID NO: 6786 - DNA, 33 bp, Homo sapiens
cacagcttaactgccaragaaaagaacaaagtc

SEQ ID NO: 6787 - DNA, 33 bp, Homo sapiens
cacaggattgaccttcrcaatgatgtgtacctg

SEQ ID NO: 6788 - DNA, 33 bp, Homo sapiens
cacatcaactctacgayataataccacaggtcc

SEQ ID NO: 6789 - DNA, 33 bp, Homo sapiens
cacatcgtcccagttargtcatctcagcaataa

SEQ ID NO: 6790 - DNA, 33 bp, Homo sapiens
cacattaaaaaaattaygcaaagatgttcaact

SEQ ID NO: 6791 - DNA, 33 bp, Homo sapiens
cacattctatgtactargcttggtgttacggag

SEQ ID NO: 6792 - DNA, 33 bp, Homo sapiens
caccaaagaattcggayggtacagccacaggca

SEQ ID NO: 6793 - DNA, 33 bp, Homo sapiens
caccacttccttaagcrgatctccctggcaact

SEQ ID NO: 6794 - DNA, 33 bp, Homo sapiens
cacccagtgtttgttayatcatgcataagtaca

SEQ ID NO: 6795 - DNA, 33 bp, Homo sapiens
caccccctgccaaagaygttcatattctaatcc

SEQ ID NO: 6796 - DNA, 33 bp, Homo sapiens
caccggaaaaactactkacaactggccacgaga

SEQ ID NO: 6797 - DNA, 33 bp, Homo sapiens
caattctaactttataygcaccagagtgaccaa

SEQ ID NO: 6798 - DNA, 33 bp, Homo sapiens
cacggaccgtggtaacygtggcagcaggaagac

SEQ ID NO: 6799 - DNA, 33 bp, Homo sapiens
cacgggatgtggcatargagtgtctaaaactag

SEQ ID NO: 6800 - DNA, 33 bp, Homo sapiens
cacggttgtctgtaggraaactcctgaagggtt

SEQ ID NO: 6801 - DNA, 33 bp, Homo sapiens
cacgttttcagtttccygctactcccacagccc

SEQ ID NO: 6802 - DNA, 33 bp, Homo sapiens
cactacccagcaaacakaagaggaaagtaactg

SEQ ID NO: 6803 - DNA, 33 bp, Homo sapiens
cactagtgagtcaatamccttcagagtgctcca

SEQ ID NO: 6804 - DNA, 33 bp, Homo sapiens
cactctacatactctayggaatggccactcttc

SEQ ID NO: 6805 - DNA, 33 bp, Homo sapiens
cactgcaggaagtcagycctttgcatttctaac

SEQ ID NO: 6806 - DNA, 33 bp, Homo sapiens
cactgtggccaattcaygctaccaatgtgacat

SEQ ID NO: 6807 - DNA, 33 bp, Homo sapiens
cactttctgattaaccyggaaatttagttagcc

SEQ ID NO: 6808 - DNA, 33 bp, Homo sapiens
cagaaaaactatagaartgcaacacaatagaac

SEQ ID NO: 6809 - DNA, 33 bp, Homo sapiens
cagaagacacttgagcratgagatgttccctgt

SEQ ID NO: 6810 - DNA, 33 bp, Homo sapiens
cagacttaaatgcaccrcacattggatgattcg

SEQ ID NO: 6811 - DNA, 33 bp, Homo sapiens
cagactttcacatccarattcaggcccatagct

SEQ ID NO: 6812 - DNA, 33 bp, Homo sapiens
cagagaatccataagaractgagaattctgagt

SEQ ID NO: 6813 - DNA, 33 bp, Homo sapiens
cagagctcatttgcacrgtcataaggttttcat

SEQ ID NO: 6814 - DNA, 33 bp, Homo sapiens
cagaggctcctcctcakcttggtcatctgtggc

SEQ ID NO: 6815 - DNA, 33 bp, Homo sapiens
cagagggaagtgttacraaggggtcagtagttt

SEQ ID NO: 6816 - DNA, 33 bp, Homo sapiens
cagagtgagtgcagacragtgactgtcgtcctc

SEQ ID NO: 6817 - DNA, 33 bp, Homo sapiens
tacctcatagtgttaaragttaatgcactgatg

SEQ ID NO: 6818 - DNA, 33 bp, Homo sapiens
cagcactttatgtgccycttggtttcaggatgc

SEQ ID NO: 6819 - DNA, 33 bp, Homo sapiens
cagcagaatcatgaacsgaataaaccttttttc

SEQ ID NO: 6820 - DNA, 33 bp, Homo sapiens
cagcagcagcaggaacsggactaaggactccac

SEQ ID NO: 6821 - DNA, 33 bp, Homo sapiens
cagcatttgccagtaaygttgtccgtgcattgc

SEQ ID NO: 6822 - DNA, 33 bp, Homo sapiens
cagccttatattggaasatgatgctgtccagga

SEQ ID NO: 6823 - DNA, 33 bp, Homo sapiens
cagcgagggagataagsctattttggccaagga

SEQ ID NO: 6824 - DNA, 33 bp, Homo sapiens
cagctactaactttccmaaatcaaggagtcaga

SEQ ID NO: 6825 - DNA, 33 bp, Homo sapiens
cagctattcattgagaytatagccatttccatc

SEQ ID NO: 6826 - DNA, 33 bp, Homo sapiens
cagctcaggttcagcaraggaatgacagtatca

SEQ ID NO: 6827 - DNA, 33 bp, Homo sapiens
cagctttacggcaatgraaaacaattttataaa

SEQ ID NO: 6828 - DNA, 33 bp, Homo sapiens
caggaagtttggtcaayagtaatgcatcaatat

SEQ ID NO: 6829 - DNA, 33 bp, Homo sapiens
taccaagtcactattayagagccaatccagatg

SEQ ID NO: 6830 - DNA, 33 bp, Homo sapiens
cagggacttaaggcagwagtggaaaaactagac

SEQ ID NO: 6831 - DNA, 33 bp, Homo sapiens
cagggaggctgactagyacttagtggactggat

SEQ ID NO: 6832 - DNA, 33 bp, Homo sapiens
caggtttctcagaaccrcaagctcataagtaag

SEQ ID NO: 6833 - DNA, 33 bp, Homo sapiens
cagtaatccaggataawgtcccatctgcctatt

SEQ ID NO: 6834 - DNA, 33 bp, Homo sapiens
cagtcaagatgagatcracaaatttaacatctt

SEQ ID NO: 6835 - DNA, 33 bp, Homo sapiens
cagtccaatgacaggargcagcaaaaagtagtt

SEQ ID NO: 6836 - DNA, 33 bp, Homo sapiens
cagtccatgactccatkagtgtccacgcctctc

SEQ ID NO: 6837 - DNA, 33 bp, Homo sapiens
cagtggagtgtagctaygagggttggctttgtg

SEQ ID NO: 6838 - DNA, 33 bp, Homo sapiens
cagtggcagattgcccrggaagaattggaggca

SEQ ID NO: 6839 - DNA, 33 bp, Homo sapiens
cagtgttaaatctacayggcactggaatctgga

SEQ ID NO: 6840 - DNA, 33 bp, Homo sapiens
cagttgtgactaataaycctaaaactaaaatgg

SEQ ID NO: 6841 - DNA, 33 bp, Homo sapiens
cataaaactgaaaaacrgcaggtatatgaaagg

SEQ ID NO: 6842 - DNA, 33 bp, Homo sapiens
cataaacagatccaacygcaaaaaccatatgat

SEQ ID NO: 6843 - DNA, 33 bp, Homo sapiens
cataattactcaaagtkaagtcgtgatccatta

SEQ ID NO: 6844 - DNA, 33 bp, Homo sapiens
catactgatcttgaagkctagtgtagcagatac

SEQ ID NO: 6845 - DNA, 33 bp, Homo sapiens
cataggtggtgattcaktagttagacaaataga

SEQ ID NO: 6846 - DNA, 33 bp, Homo sapiens
catatcaatcacattayacattttggaatcaca

SEQ ID NO: 6847 - DNA, 33 bp, Homo sapiens
catatccatcattgtgsaaagttctactggaca

SEQ ID NO: 6848 - DNA, 33 bp, Homo sapiens
catatgcctgaacttayctaaaaaatttcctac

SEQ ID NO: 6849 - DNA, 33 bp, Homo sapiens
catccagggaaccacaygcctagaaagacccca

SEQ ID NO: 6850 - DNA, 33 bp, Homo sapiens
catgcctgttttcacayagagtaaggtgcaaga

SEQ ID NO: 6851 - DNA, 33 bp, Homo sapiens
catgctaactttggacwgaatccatttgaaagt

SEQ ID NO: 6852 - DNA, 33 bp, Homo sapiens
catgggccttggaaacygagtgatcatggtgac

SEQ ID NO: 6853 - DNA, 33 bp, Homo sapiens
catgtcagttgttataygcccactgtttttatt

SEQ ID NO: 6854 - DNA, 33 bp, Homo sapiens
catgtgcacaagaccasgagagtaactgatcct

SEQ ID NO: 6855 - DNA, 33 bp, Homo sapiens
cattacctctaccccartatttcactgttgagt

SEQ ID NO: 6856 - DNA, 33 bp, Homo sapiens
cattagttaggcatcaragcctcaaaatgaata

SEQ ID NO: 6857 - DNA, 33 bp, Homo sapiens
cattatccagttttaayagaaccaacgtgaccc

SEQ ID NO: 6858 - DNA, 33 bp, Homo sapiens
cattccttggcaaactracagaatgaaatctca

SEQ ID NO: 6859 - DNA, 33 bp, Homo sapiens
cattgttttaagataaytccagaatcttcacgg

SEQ ID NO: 6860 - DNA, 33 bp, Homo sapiens
cattttggcttgatcawctcatcaggggaattc

SEQ ID NO: 6861 - DNA, 33 bp, Homo sapiens
catttttagatgataaygtctctactccagata

SEQ ID NO: 6862 - DNA, 33 bp, Homo sapiens
ccaaaataaagcaagamcttcaaagatgtttca

SEQ ID NO: 6863 - DNA, 33 bp, Homo sapiens
ccaaatgggctagaacrcggacgatctgaactg

SEQ ID NO: 6864 - DNA, 33 bp, Homo sapiens
ccaactaagaaacgtaygagtgcttgcctctgc

SEQ ID NO: 6865 - DNA, 33 bp, Homo sapiens
ccaagatgctctgaaaytggaactttctctctg

SEQ ID NO: 6866 - DNA, 33 bp, Homo sapiens
ccaagctgagggaagaygattaacgctagcctc

SEQ ID NO: 6867 - DNA, 33 bp, Homo sapiens
ccaagtgggcttaacayggacactgccctgggg

SEQ ID NO: 6868 - DNA, 33 bp, Homo sapiens
ccaagtttccatgaacrgataaacagatcaaca

SEQ ID NO: 6869 - DNA, 33 bp, Homo sapiens
ccaatttctttagtaasagtcagcaaaagcctt

SEQ ID NO: 6870 - DNA, 33 bp, Homo sapiens
ccacaaagttgttttckacgagaattcgatggg

SEQ ID NO: 6871 - DNA, 33 bp, Homo sapiens
ccacagtcatgctcaaycaaatattttattttg

SEQ ID NO: 6872 - DNA, 33 bp, Homo sapiens
ccagaatatatacaacmcaaaagattgcagtgg

SEQ ID NO: 6873 - DNA, 33 bp, Homo sapiens
ccagctcactagaacarcgtgtacaaggattgg

SEQ ID NO: 6874 - DNA, 33 bp, Homo sapiens
ccagtgcttgaccctcrccaacgaccgcactct

SEQ ID NO: 6875 - DNA, 33 bp, Homo sapiens
ccagtgtctcttaaaaytgacataaaacataaa

SEQ ID NO: 6876 - DNA, 33 bp, Homo sapiens
ccagttgtttgaaagcrcagccgtgacctggcc

SEQ ID NO: 6877 - DNA, 33 bp, Homo sapiens
ccatcttatacaatcayctttgcaggttggatg

SEQ ID NO: 6878 - DNA, 33 bp, Homo sapiens
ccatgaaacggtcggcratgatggacactccca

SEQ ID NO: 6879 - DNA, 33 bp, Homo sapiens
ccatggaaaccaccgargtcaatctcaattata

SEQ ID NO: 6880 - DNA, 33 bp, Homo sapiens
ccatggggagaaatgayggtgtgggccaaatca

SEQ ID NO: 6881 - DNA, 33 bp, Homo sapiens
ccattcctccttgacaytggatatgcattcttt

SEQ ID NO: 6882 - DNA, 33 bp, Homo sapiens
ccattgtctgaaggaasagaaattactgatgaa

SEQ ID NO: 6883 - DNA, 33 bp, Homo sapiens
ccatttgcccatcccaracagaggtagcctcct

SEQ ID NO: 6884 - DNA, 33 bp, Homo sapiens
taaataaactcgagaawgataaatgtcaaggac

SEQ ID NO: 6885 - DNA, 33 bp, Homo sapiens
cccaaagctgtgtccartcacgttcctgtgtgt

SEQ ID NO: 6886 - DNA, 33 bp, Homo sapiens
cccacactactggtacmaattttgtgaattggt

SEQ ID NO: 6887 - DNA, 33 bp, Homo sapiens
cccacagctctgtgaartggcaggtcatccatt

SEQ ID NO: 6888 - DNA, 33 bp, Homo sapiens
cccacatttgcacttawagttggctcttctcag

SEQ ID NO: 6889 - DNA, 33 bp, Homo sapiens
cccaccagcacagtgayggtttataaatgccat

SEQ ID NO: 6890 - DNA, 33 bp, Homo sapiens
cccacctcgaagatgasaagtttgaaccacatg

SEQ ID NO: 6891 - DNA, 33 bp, Homo sapiens
cccacctggctagtaayggcaaatgcctactta

SEQ ID NO: 6892 - DNA, 33 bp, Homo sapiens
cccagcaatcagttcartcattggaagctccca

SEQ ID NO: 6893 - DNA, 33 bp, Homo sapiens
cccagtggagcaaacayctgggttcctaagtca

SEQ ID NO: 6894 - DNA, 33 bp, Homo sapiens
ccccacacaggacagarcctggaatcactttct

SEQ ID NO: 6895 - DNA, 33 bp, Homo sapiens
ccccttgaaagtagaaraggaagacagaagcat

SEQ ID NO: 6896 - DNA, 33 bp, Homo sapiens
tcacctctagataaaastatttaattgccgcta

SEQ ID NO: 6897 - DNA, 33 bp, Homo sapiens
ccctaatcctgtggcaraggtcactcaaaccct

SEQ ID NO: 6898 - DNA, 33 bp, Homo sapiens
ccctactcagaatagcragtcctgcagccctgg

SEQ ID NO: 6899 - DNA, 33 bp, Homo sapiens
ccctggatcttattgamgccttctgttttagct

SEQ ID NO: 6900 - DNA, 33 bp, Homo sapiens
cccttttaaagtcctgrataaacacctgctggt

SEQ ID NO: 6901 - DNA, 33 bp, Homo sapiens
ccgaagtgttcacctaraatagtacagtgcacc

SEQ ID NO: 6902 - DNA, 33 bp, Homo sapiens
ccgaataattactgagraagactgagatattca

SEQ ID NO: 6903 - DNA, 33 bp, Homo sapiens
ggtgggaatagcttcawgccaggaaatagcttt

SEQ ID NO: 6904 - DNA, 33 bp, Homo sapiens
cagacccagtgctagaygtagatcccaatcaca

SEQ ID NO: 6905 - DNA, 33 bp, Homo sapiens
cctactaaactctaccrcatggagtcatacctc

SEQ ID NO: 6906 - DNA, 33 bp, Homo sapiens
cctatctatcaatccawgctaaatccaggtcat

SEQ ID NO: 6907 - DNA, 33 bp, Homo sapiens
cctcagtggtcaagtcyagtctggttgtggagg

SEQ ID NO: 6908 - DNA, 33 bp, Homo sapiens
cctcccagagtgatagkattacatgcgtgagcc

SEQ ID NO: 6909 - DNA, 33 bp, Homo sapiens
cctccccttcctttaaygaactgagtgactttc

SEQ ID NO: 6910 - DNA, 33 bp, Homo sapiens
cctctactttttattcrcatcgaattgcagacc

SEQ ID NO: 6911 - DNA, 33 bp, Homo sapiens
cctctgtcagcactacraccaccactcattctg

SEQ ID NO: 6912 - DNA, 33 bp, Homo sapiens
cctgatgactgttttaygatgcgctaccttgtt

SEQ ID NO: 6913 - DNA, 33 bp, Homo sapiens
cctgcaagtaaattccrggaaaatactatagta

SEQ ID NO: 6914 - DNA, 33 bp, Homo sapiens
cctgccaggagtaaccraggaagccaaccctga

SEQ ID NO: 6915 - DNA, 33 bp, Homo sapiens
cctggagtccactgcargcacaagcaggcaaag

SEQ ID NO: 6916 - DNA, 33 bp, Homo sapiens
cctgtaggatcctgaaycacaaccattacaatt

SEQ ID NO: 6917 - DNA, 33 bp, Homo sapiens
cctgtctaaccctcatragaaagatcctggttg

SEQ ID NO: 6918 - DNA, 33 bp, Homo sapiens
cctgtgttttcctatgraggtggaacgtgttta

SEQ ID NO: 6919 - DNA, 33 bp, Homo sapiens
ccttattggagaatggwatctagaagccaaggt

SEQ ID NO: 6920 - DNA, 33 bp, Homo sapiens
gatgtttgttggaggasagtaatatctcagttc

SEQ ID NO: 6921 - DNA, 33 bp, Homo sapiens
ccttgatctcgggttgkatgttccccgtgtccc

SEQ ID NO: 6922 - DNA, 33 bp, Homo sapiens
cctttccctttctcacrctaaatgtcctgaata

SEQ ID NO: 6923 - DNA, 33 bp, Homo sapiens
cctttgtgctgtcccamagatttgtttgaggac

SEQ ID NO: 6924 - DNA, 33 bp, Homo sapiens
agagaaagatgtcaaamgtgaaagcaaagttct

SEQ ID NO: 6925 - DNA, 33 bp, Homo sapiens
cgagatttcagaaaacrgtttcctcttcttcaa

SEQ ID NO: 6926 - DNA, 33 bp, Homo sapiens
gtcagaaaaggatccasggagatataattgcag

SEQ ID NO: 6927 - DNA, 33 bp, Homo sapiens
cgatggtacatgaagaygcaaagggaaatattt

SEQ ID NO: 6928 - DNA, 33 bp, Homo sapiens
cgcactgtgcagtaacyatatatctcctcctct

SEQ ID NO: 6929 - DNA, 33 bp, Homo sapiens
cgggcaggactgcccartgctttcctggcttag

SEQ ID NO: 6930 - DNA, 33 bp, Homo sapiens
cggggtgaggtggaaaygtaggtgtgccattct

SEQ ID NO: 6931 - DNA, 33 bp, Homo sapiens
cgtaaatgctccctacwatacccctagtaagta

SEQ ID NO: 6932 - DNA, 33 bp, Homo sapiens
cgtgccattttttaacmatcactagtctcattg

SEQ ID NO: 6933 - DNA, 33 bp, Homo sapiens
cgtgctctgttatcccrgaaagcttgcaatagc

SEQ ID NO: 6934 - DNA, 33 bp, Homo sapiens
cgtggcaaattgtttawcgtgtcatgtaattta

SEQ ID NO: 6935 - DNA, 33 bp, Homo sapiens
cgtggctcgaggttacyggtactttgtgtactt

SEQ ID NO: 6936 - DNA, 33 bp, Homo sapiens
cgttttgtctaatgcartcaagactagtggttc

SEQ ID NO: 6937 - DNA, 33 bp, Homo sapiens
ctaaatccttccgtaaygtgtggtcaaggagtt

SEQ ID NO: 6938 - DNA, 33 bp, Homo sapiens
ctaaatctgtatacatsaggcaaaaagcaaagc

SEQ ID NO: 6939 - DNA, 33 bp, Homo sapiens
ctaacagtgtcccttayagaaatcagtgaaaca

SEQ ID NO: 6940 - DNA, 33 bp, Homo sapiens
ctaagaaggcagagaayaaccagaaagcgaatg

SEQ ID NO: 6941 - DNA, 33 bp, Homo sapiens
ctaagatacagctctcrcaatatttggaaggcc

SEQ ID NO: 6942 - DNA, 33 bp, Homo sapiens
ctaatttgcaaatccartgatatggtcaaatga

SEQ ID NO: 6943 - DNA, 33 bp, Homo sapiens
ctacaaaatcagacaarccagtttattaatttg

SEQ ID NO: 6944 - DNA, 33 bp, Homo sapiens
ctacctcagttagttakactggttttcctcctc

SEQ ID NO: 6945 - DNA, 33 bp, Homo sapiens
ctaccttgtgagatgarcaatattatccccatg

SEQ ID NO: 6946 - DNA, 33 bp, Homo sapiens
cttatttgtatatccayggctaggtctaaagag

SEQ ID NO: 6947 - DNA, 33 bp, Homo sapiens
ctactgcttgcattaarcacaacacttctttcc

SEQ ID NO: 6948 - DNA, 33 bp, Homo sapiens
ctactgtgaaaaagaaygaaagtcaacgtggag

SEQ ID NO: 6949 - DNA, 33 bp, Homo sapiens
ctagaagatttagtatmaggaacaaacagacaa

SEQ ID NO: 6950 - DNA, 33 bp, Homo sapiens
ctagacttttctgccaygtaaactaagactgat

SEQ ID NO: 6951 - DNA, 33 bp, Homo sapiens
ctagttcagcgctttayctaattcttaaatgag

SEQ ID NO: 6952 - DNA, 33 bp, Homo sapiens
ctcaaagcaggaccaakaaatatgacatgcctc

SEQ ID NO: 6953 - DNA, 33 bp, Homo sapiens
ctcaagcaacaactgaygccctgtgtccaacta

SEQ ID NO: 6954 - DNA, 33 bp, Homo sapiens
ctcaagtgttgctttayccttggaggcactggg

SEQ ID NO: 6955 - DNA, 33 bp, Homo sapiens
ctcacctctaacaataygctggaaaaaaaatta

SEQ ID NO: 6956 - DNA, 33 bp, Homo sapiens
ctcagcttcaaaagacrgagactcttgggcgtt

SEQ ID NO: 6957 - DNA, 33 bp, Homo sapiens
ctcatccatatttaacwacatcgtccttcaact

SEQ ID NO: 6958 - DNA, 33 bp, Homo sapiens
ctcattgtgtctgtagwaaaagatacaccttgg

SEQ ID NO: 6959 - DNA, 33 bp, Homo sapiens
ctccaaatagctcccartgagccttacctcctg

SEQ ID NO: 6960 - DNA, 33 bp, Homo sapiens
ctccaagtcctcaaccmgggaaatcgcccttct

SEQ ID NO: 6961 - DNA, 33 bp, Homo sapiens
ctccaccatcaaaatcraggactgtggatattt

SEQ ID NO: 6962 - DNA, 33 bp, Homo sapiens
ctccactagtctcatcracaatattatttagtt

SEQ ID NO: 6963 - DNA, 33 bp, Homo sapiens
ctccactccagaggaaygggtcaggcggtgcac

SEQ ID NO: 6964 - DNA, 33 bp, Homo sapiens
ctccatactctttcaawggacgatatcagctgt

SEQ ID NO: 6965 - DNA, 33 bp, Homo sapiens
ctccatttcacccaagwaaaagtcggtatgtgc

SEQ ID NO: 6966 - DNA, 33 bp, Homo sapiens
ctcccaaacactaggcraaaggatctgcctcgg

SEQ ID NO: 6967 - DNA, 33 bp, Homo sapiens
ctcctgcttcttttctyaacacagtagccaggg

SEQ ID NO: 6968 - DNA, 33 bp, Homo sapiens
ctcctttgcatcagccrccgtaataagtagtcc

SEQ ID NO: 6969 - DNA, 33 bp, Homo sapiens
ctctacctctctgataycatttatttaccctgc

SEQ ID NO: 6970 - DNA, 33 bp, Homo sapiens
ctctccgcattcccccsagtttctcccctccct

SEQ ID NO: 6971 - DNA, 33 bp, Homo sapiens
ctctgagctcttcaaamtgaaccataagctggg

SEQ ID NO: 6972 - DNA, 33 bp, Homo sapiens
ctctggggtaaatgccyaaaagtgtcgtaattg

SEQ ID NO: 6973 - DNA, 33 bp, Homo sapiens
ctcttcctttttgaacraagttgaggttagctg

SEQ ID NO: 6974 - DNA, 33 bp, Homo sapiens
ctcttgacattacctakcaattgacatttggtt

SEQ ID NO: 6975 - DNA, 33 bp, Homo sapiens
ctcttttagttgcatayaagtgaatcataatcc

SEQ ID NO: 6976 - DNA, 33 bp, Homo sapiens
ctcttttctttgtgccrccatgtgtcgtcatac

SEQ ID NO: 6977 - DNA, 33 bp, Homo sapiens
ctgaaacaacttccacrcacagtgtatgatttc

SEQ ID NO: 6978 - DNA, 33 bp, Homo sapiens
ctgaagcatctccaaargtcacacaaaaggaga

SEQ ID NO: 6979 - DNA, 33 bp, Homo sapiens
ctgaagtccacgttctyactccaacattactaa

SEQ ID NO: 6980 - DNA, 33 bp, Homo sapiens
ctgaagtcttttcagarcctttgccagcacttt

SEQ ID NO: 6981 - DNA, 33 bp, Homo sapiens
ctgacaatccaagaaaygaatctttagcattgg

SEQ ID NO: 6982 - DNA, 33 bp, Homo sapiens
ctgacacttgctctacracaaaggagttactaa

SEQ ID NO: 6983 - DNA, 33 bp, Homo sapiens
ctgacctgacacaaaaytcgtactccttccccg

SEQ ID NO: 6984 - DNA, 33 bp, Homo sapiens
ctgagaatcgggtaacrgagaggtttattgatt

SEQ ID NO: 6985 - DNA, 33 bp, Homo sapiens
ctgagaggtgttcagayggtgagttaggaacaa

SEQ ID NO: 6986 - DNA, 33 bp, Homo sapiens
ctgagctttcaacatcrgacattcaggtggctt

SEQ ID NO: 6987 - DNA, 33 bp, Homo sapiens
ctgatagagagccttayggattgggttgacact

SEQ ID NO: 6988 - DNA, 33 bp, Homo sapiens
ctgatcattggttcaamtgttcagccaggccaa

SEQ ID NO: 6989 - DNA, 33 bp, Homo sapiens
ctgcaacattgccaacygattggaccctgattc

SEQ ID NO: 6990 - DNA, 33 bp, Homo sapiens
tagtggcttaacttaamgtacaacagtaatggt

SEQ ID NO: 6991 - DNA, 33 bp, Homo sapiens
ctgcagcagtactctgratttatgtgggctttc

SEQ ID NO: 6992 - DNA, 33 bp, Homo sapiens
ctgccatcaggacacgrattttttggccagaag

SEQ ID NO: 6993 - DNA, 33 bp, Homo sapiens
ctgcctagaagacatcrcatgaatccatagatg

SEQ ID NO: 6994 - DNA, 33 bp, Homo sapiens
ctgcctctcttgtagcygccttctagcaaagca

SEQ ID NO: 6995 - DNA, 33 bp, Homo sapiens
ctgcctgtgtagaacaractttagctgacaaaa

SEQ ID NO: 6996 - DNA, 33 bp, Homo sapiens
ctggaatctgtgagaastggatcctcttgtaga

SEQ ID NO: 6997 - DNA, 33 bp, Homo sapiens
ctggctccctgatccayggaggaaggcctatta

SEQ ID NO: 6998 - DNA, 33 bp, Homo sapiens
ctggctcttagtggaawggtgctttaaaagtcc

SEQ ID NO: 6999 - DNA, 33 bp, Homo sapiens
ctgggcttaacacccartaaagaactttgctga

SEQ ID NO: 7000 - DNA, 33 bp, Homo sapiens
ctgggtctcaggtataygaaattcacaagtacc

SEQ ID NO: 7001 - DNA, 33 bp, Homo sapiens
ctggtcccatttactaygtcaatttcacagatt

SEQ ID NO: 7002 - DNA, 33 bp, Homo sapiens
ctggtcctagttacccsacaatattgctgcctc

SEQ ID NO: 7003 - DNA, 33 bp, Homo sapiens
ctggttcaactgtactyagccagagttctgaag

SEQ ID NO: 7004 - DNA, 33 bp, Homo sapiens
ctgtaacaaaaattccycaatctgcttcatggg

SEQ ID NO: 7005 - DNA, 33 bp, Homo sapiens
ctgtaacgtttgcatgraatcccattactggga

SEQ ID NO: 7006 - DNA, 33 bp, Homo sapiens
ctgtatccatataaagmagctgacttaattgat

SEQ ID NO: 7007 - DNA, 33 bp, Homo sapiens
ctgtcaagtacaaaacraaactgcagaataaaa

SEQ ID NO: 7008 - DNA, 33 bp, Homo sapiens
ctgtgataaaagattcrctgtgacagagaacaa

SEQ ID NO: 7009 - DNA, 33 bp, Homo sapiens
ctgtggccacttctgargtacgctccacacttc

SEQ ID NO: 7010 - DNA, 33 bp, Homo sapiens
ctgtggcccttttttcyaaacacaggaagacaa

SEQ ID NO: 7011 - DNA, 33 bp, Homo sapiens
ctgtggtgagtgtcacrcatcatttcacaccgc

SEQ ID NO: 7012 - DNA, 33 bp, Homo sapiens
ctgtgtctgacatccaratatttctagtactga

SEQ ID NO: 7013 - DNA, 33 bp, Homo sapiens
ctgttaacagttaattyaagcctgcaaatatca

SEQ ID NO: 7014 - DNA, 33 bp, Homo sapiens
ctgtttaataagctgawatagctgtacctaaaa

SEQ ID NO: 7015 - DNA, 33 bp, Homo sapiens
cttaaaatataaaagaygtctaccaatcaatta

SEQ ID NO: 7016 - DNA, 33 bp, Homo sapiens
cttaagttgtgaggcaytcggtacatagattga

SEQ ID NO: 7017 - DNA, 33 bp, Homo sapiens
cttaatttggtagccaygttgcaaggaagaagt

SEQ ID NO: 7018 - DNA, 33 bp, Homo sapiens
cttacaggcaacaaacmagtgctggaacgtggc

SEQ ID NO: 7019 - DNA, 33 bp, Homo sapiens
cttacatatgttagctsaaattttcaaaatacc

SEQ ID NO: 7020 - DNA, 33 bp, Homo sapiens
cttacctggggcgccarattgacattctttttt

SEQ ID NO: 7021 - DNA, 33 bp, Homo sapiens
cttactgaaataagaartatggatgtaggactg

SEQ ID NO: 7022 - DNA, 33 bp, Homo sapiens
cttattactcagtgggraagacaacattgaaca

SEQ ID NO: 7023 - DNA, 33 bp, Homo sapiens
cttattttatgagggarattttggagttaaaga

SEQ ID NO: 7024 - DNA, 33 bp, Homo sapiens
cttcataccttaacgawagaaaataaccagctt

SEQ ID NO: 7025 - DNA, 33 bp, Homo sapiens
cttcatgagttgtttcraggactaaaccagaag

SEQ ID NO: 7026 - DNA, 33 bp, Homo sapiens
cttcccatttcttgcarggttaagtccaaaaac

SEQ ID NO: 7027 - DNA, 33 bp, Homo sapiens
cttcctaccttcttgasctgtcttggactgccc

SEQ ID NO: 7028 - DNA, 33 bp, Homo sapiens
cttctttgctatattakgctatttgtgacaaaa

SEQ ID NO: 7029 - DNA, 33 bp, Homo sapiens
cttgaggtgtctcttamcacatggttctacgtg

SEQ ID NO: 7030 - DNA, 33 bp, Homo sapiens
cttgatgatgtcactgraccaacaaatcacctt

SEQ ID NO: 7031 - DNA, 33 bp, Homo sapiens
cttgcaagctgagtagscaaaacttgctttgag

SEQ ID NO: 7032 - DNA, 33 bp, Homo sapiens
cttgcagaggggcagaycgaggttcaatcatgt

SEQ ID NO: 7033 - DNA, 33 bp, Homo sapiens
cttgcgttggtttaccyagactcacaggaggcc

SEQ ID NO: 7034 - DNA, 33 bp, Homo sapiens
cttggaatttatgttgraaacagctccctgacc

SEQ ID NO: 7035 - DNA, 33 bp, Homo sapiens
cttgggaaacaagaacraggatggagttccaag

SEQ ID NO: 7036 - DNA, 33 bp, Homo sapiens
cttgtgtccaaacaagsctgtttacaaaagtga

SEQ ID NO: 7037 - DNA, 33 bp, Homo sapiens
ctttaatctgtcactawatctttttgcttctat

SEQ ID NO: 7038 - DNA, 33 bp, Homo sapiens
ctttagggtatgaatgyaactttgctgtatgac

SEQ ID NO: 7039 - DNA, 33 bp, Homo sapiens
ctttcagcccaagttgmattaggccatctcact

SEQ ID NO: 7040 - DNA, 33 bp, Homo sapiens
ctttcatgttgcaaacraagagcaaaagctgag

SEQ ID NO: 7041 - DNA, 33 bp, Homo sapiens
ctttccatttacctcaygagagcaaaaggtgca

SEQ ID NO: 7042 - DNA, 33 bp, Homo sapiens
ctttcctctccaaatastaaagcaaacttttcc

SEQ ID NO: 7043 - DNA, 33 bp, Homo sapiens
ctttctctctctcaackggtaatagtttgtaac

SEQ ID NO: 7044 - DNA, 33 bp, Homo sapiens
ctttgataaacggagaktccaagaagtctttag

SEQ ID NO: 7045 - DNA, 33 bp, Homo sapiens
ctttgcagacattggarataacatttgaatggg

SEQ ID NO: 7046 - DNA, 33 bp, Homo sapiens
ctttgggatttttatayggcatagttagactgg

SEQ ID NO: 7047 - DNA, 33 bp, Homo sapiens
ctttggggtttctccartcatctaaacttctga

SEQ ID NO: 7048 - DNA, 33 bp, Homo sapiens
cttttaaaaatcatgasagtccagggatctaga

SEQ ID NO: 7049 - DNA, 33 bp, Homo sapiens
cttttatgatagactaraaggtgaaggggaaga

SEQ ID NO: 7050 - DNA, 33 bp, Homo sapiens
cttttgttgttgagcawcttcctggcattggcc

SEQ ID NO: 7051 - DNA, 33 bp, Homo sapiens
ctttttcagaaattaayaagctgaccatgaaat

SEQ ID NO: 7052 - DNA, 33 bp, Homo sapiens
ctttttcttgtcctacygcattggctaacacct

SEQ ID NO: 7053 - DNA, 33 bp, Homo sapiens
cttttttcttattaagyctgaatctgagacaag

SEQ ID NO: 7054 - DNA, 33 bp, Homo sapiens
gaaaaaagcctacagartaatgatgtaaagaaa

SEQ ID NO: 7055 - DNA, 33 bp, Homo sapiens
gaaaacaaaaggcgcaytgaacatacaacccca

SEQ ID NO: 7056 - DNA, 33 bp, Homo sapiens
gaaaatccacatcttayactgtacacaaaaatc

SEQ ID NO: 7057 - DNA, 33 bp, Homo sapiens
gaaaattgctcatcaastcggggaagtcaaagt

SEQ ID NO: 7058 - DNA, 33 bp, Homo sapiens
attcatgaaaagctgaratgttatggagtatca

SEQ ID NO: 7059 - DNA, 33 bp, Homo sapiens
gaaacccagaccaccarcttgagaggacaagga

SEQ ID NO: 7060 - DNA, 33 bp, Homo sapiens
gaaatgtaaagaaagasattgatcactaccata

SEQ ID NO: 7061 - DNA, 33 bp, Homo sapiens
gaaattcttcttgccaygattaactttcatttc

SEQ ID NO: 7062 - DNA, 33 bp, Homo sapiens
gaacaagactgactacyaacaagcacaaggaaa

SEQ ID NO: 7063 - DNA, 33 bp, Homo sapiens
gaacaagagtgtgagcractgaatctgcatttt

SEQ ID NO: 7064 - DNA, 33 bp, Homo sapiens
gaacaagctagactcartagcaaggcttttgtt

SEQ ID NO: 7065 - DNA, 33 bp, Homo sapiens
gaacagacaggaagaargcggggtgaggctgta

SEQ ID NO: 7066 - DNA, 33 bp, Homo sapiens
gaacatttcctgatacyagtgcaacaggtgaca

SEQ ID NO: 7067 - DNA, 33 bp, Homo sapiens
gaaccagggaaagaaartgttgtttgttgtgaa

SEQ ID NO: 7068 - DNA, 33 bp, Homo sapiens
gaactaatgagtttaaygtgtttagctgtgcct

SEQ ID NO: 7069 - DNA, 33 bp, Homo sapiens
gaactccaccaaaagayccccggcaagagatga

SEQ ID NO: 7070 - DNA, 33 bp, Homo sapiens
gaactcctgaataaccraagagaagatccttct

SEQ ID NO: 7071 - DNA, 33 bp, Homo sapiens
gaactgaacggcgcagrctattgacatattttt

SEQ ID NO: 7072 - DNA, 33 bp, Homo sapiens
gaacttacacatttgaycacacattggaccacc

SEQ ID NO: 7073 - DNA, 33 bp, Homo sapiens
gaagatggccatgacartgagattaagagacac

SEQ ID NO: 7074 - DNA, 33 bp, Homo sapiens
gaagattcactcctgamaaataactcagttgac

SEQ ID NO: 7075 - DNA, 33 bp, Homo sapiens
gaagcctatagactcgragtgcataaaataccc

SEQ ID NO: 7076 - DNA, 33 bp, Homo sapiens
gaaggggctgcggagcragagaaaagcgtcagc

SEQ ID NO: 7077 - DNA, 33 bp, Homo sapiens
gaaggttttcaatcaasgcaactttacgatcag

SEQ ID NO: 7078 - DNA, 33 bp, Homo sapiens
taaatgtgttatctgarcaagcaaaacctaaga

SEQ ID NO: 7079 - DNA, 33 bp, Homo sapiens
gaatcagacagcaaaakaatgtgtggacaagat

SEQ ID NO: 7080 - DNA, 33 bp, Homo sapiens
gaatcattggatctagractttgcattcagcaa

SEQ ID NO: 7081 - DNA, 33 bp, Homo sapiens
gaatccaggtggcaggyaatactcagcagactg

SEQ ID NO: 7082 - DNA, 33 bp, Homo sapiens
gaatgcttcccttccawgacaatattcagaggc

SEQ ID NO: 7083 - DNA, 33 bp, Homo sapiens
gacactttatccagcarctttcttagaataatg

SEQ ID NO: 7084 - DNA, 33 bp, Homo sapiens
gacagaaaacaccgtcycaagctttgcaaatct

SEQ ID NO: 7085 - DNA, 33 bp, Homo sapiens
gacagactgtgaggtayacaaatgttagtttta

SEQ ID NO: 7086 - DNA, 33 bp, Homo sapiens
gacaggtcaccgcatcygaggcaacggagacaa

SEQ ID NO: 7087 - DNA, 33 bp, Homo sapiens
gacataaaccatcccayaaaaagagagcaagag

SEQ ID NO: 7088 - DNA, 33 bp, Homo sapiens
gacatttatctcttcartacgacgtttataaat

SEQ ID NO: 7089 - DNA, 33 bp, Homo sapiens
gaccaggctaacaaacyctgaacccactgatgt

SEQ ID NO: 7090 - DNA, 33 bp, Homo sapiens
gacctactgcatcttakagactcaccaccaggg

SEQ ID NO: 7091 - DNA, 33 bp, Homo sapiens
gacctgatacaacaatwaagaacataaaggcat

SEQ ID NO: 7092 - DNA, 33 bp, Homo sapiens
gactgaagcgtgaagarcaatactcaggacctc

SEQ ID NO: 7093 - DNA, 33 bp, Homo sapiens
gactggcgaagtaagayaaggccatttagagtt

SEQ ID NO: 7094 - DNA, 33 bp, Homo sapiens
gactgtttcaaagggcmgaaagctgtggccatg

SEQ ID NO: 7095 - DNA, 33 bp, Homo sapiens
gacttcagttatatccyggaactggcaaattgt

SEQ ID NO: 7096 - DNA, 33 bp, Homo sapiens
gagaacagaagcttcargagaagaaaatggccc

SEQ ID NO: 7097 - DNA, 33 bp, Homo sapiens
gagaaggaattggcacwctagaattaatattat

SEQ ID NO: 7098 - DNA, 33 bp, Homo sapiens
gagaatgaactgatcayagagacttgaggtatt

SEQ ID NO: 7099 - DNA, 33 bp, Homo sapiens
gagactcaaagtttcargagcaaatagagaaga

SEQ ID NO: 7100 - DNA, 33 bp, Homo sapiens
gagagaattaaatctgsaagctaagtgccttgg

SEQ ID NO: 7101 - DNA, 33 bp, Homo sapiens
gagagagcagaataagrcccagtgaatacatag

SEQ ID NO: 7102 - DNA, 33 bp, Homo sapiens
gagaggaaatacgtaaytctatgtctatgcttg

SEQ ID NO: 7103 - DNA, 33 bp, Homo sapiens
gagagtccatgtcatcrctttccaagacatcag

SEQ ID NO: 7104 - DNA, 33 bp, Homo sapiens
gagagtttggtgcatartagactcaaataaaat

SEQ ID NO: 7105 - DNA, 33 bp, Homo sapiens
gagcatccctttcaaayggaagggccggatcct

SEQ ID NO: 7106 - DNA, 33 bp, Homo sapiens
gagcccaaacattagayccccttgagcacatgg

SEQ ID NO: 7107 - DNA, 33 bp, Homo sapiens
gagcctataagccaggyattctgctagatgata

SEQ ID NO: 7108 - DNA, 33 bp, Homo sapiens
gagctaagcactttacsacctcttcttatcatc

SEQ ID NO: 7109 - DNA, 33 bp, Homo sapiens
gagctagaagttcaaaycataaacaataagtga

SEQ ID NO: 7110 - DNA, 33 bp, Homo sapiens
gaggaccacgaggcctragagaacttaagtatc

SEQ ID NO: 7111 - DNA, 33 bp, Homo sapiens
gaggagaggagtttcaygcaaaatagcccccgc

SEQ ID NO: 7112 - DNA, 33 bp, Homo sapiens
gaggatttgctattgayactgaactggattaac

SEQ ID NO: 7113 - DNA, 33 bp, Homo sapiens
gaggcagtagatagtgraaagagcacagggtgt

SEQ ID NO: 7114 - DNA, 33 bp, Homo sapiens
gaggctgaatactagcrcttattccgtctaact

SEQ ID NO: 7115 - DNA, 33 bp, Homo sapiens
gagggtgactagctctraccttggaaaacctta

SEQ ID NO: 7116 - DNA, 33 bp, Homo sapiens
gaggtggtatcgcccaygcaacatctgggaccc

SEQ ID NO: 7117 - DNA, 33 bp, Homo sapiens
gagtaaaagaggaagcraaagaaagaaggaaga

SEQ ID NO: 7118 - DNA, 33 bp, Homo sapiens
gagtcaaattactgtgwacctcctcatgccagg

SEQ ID NO: 7119 - DNA, 33 bp, Homo sapiens
gagtcatttgcatacaytgtaaggataataacc

SEQ ID NO: 7120 - DNA, 33 bp, Homo sapiens
gagtccagggctgttcrgaaaaatgaagcagtt

SEQ ID NO: 7121 - DNA, 33 bp, Homo sapiens
gagtctgttagcctackatatctacagctgaag

SEQ ID NO: 7122 - DNA, 33 bp, Homo sapiens
gagttaaccacttgtaytaaggtccaaacagaa

SEQ ID NO: 7123 - DNA, 33 bp, Homo sapiens
gagttgaagtgttctayaggcccatccttccta

SEQ ID NO: 7124 - DNA, 33 bp, Homo sapiens
gagttgcctgttcttcragtgggcatactgcct

SEQ ID NO: 7125 - DNA, 33 bp, Homo sapiens
gagtttgcttcccaaasagtacataggctacaa

SEQ ID NO: 7126 - DNA, 33 bp, Homo sapiens
gataaaaatctagaccrcgtgtatcttgtaaca

SEQ ID NO: 7127 - DNA, 33 bp, Homo sapiens
gataaaagctaggacartgtaggaaacttttta

SEQ ID NO: 7128 - DNA, 33 bp, Homo sapiens
gatagtaataaggtgcrgaagtaacccagtctg

SEQ ID NO: 7129 - DNA, 33 bp, Homo sapiens
gatatgaaacacaaaamactgccaggaatatag

SEQ ID NO: 7130 - DNA, 33 bp, Homo sapiens
gatcacagaaggttaamtaattcacaaacaaga

SEQ ID NO: 7131 - DNA, 33 bp, Homo sapiens
gatcatacctgcctgaytatacaaaagggtaga

SEQ ID NO: 7132 - DNA, 33 bp, Homo sapiens
gatcattttttaggaaytaaggctcatgggcga

SEQ ID NO: 7133 - DNA, 33 bp, Homo sapiens
gatcccagaacaaaccrgcaatgttgacaccct

SEQ ID NO: 7134 - DNA, 33 bp, Homo sapiens
gatctgtcaacttaaasgtaaaaggaacagtgg

SEQ ID NO: 7135 - DNA, 33 bp, Homo sapiens
gatgaatcaggccaaaycaggattctgctctca

SEQ ID NO: 7136 - DNA, 33 bp, Homo sapiens
gatgactgcaggatctraaaaaaccacggtatg

SEQ ID NO: 7137 - DNA, 33 bp, Homo sapiens
gatgcacagagttatamaatgaagaagagcttt

SEQ ID NO: 7138 - DNA, 33 bp, Homo sapiens
gatggaagcagtatacyattctcacttgtttta

SEQ ID NO: 7139 - DNA, 33 bp, Homo sapiens
gatggagtgtttgccayaagcttctctttattc

SEQ ID NO: 7140 - DNA, 33 bp, Homo sapiens
gatggcatggcagagcygaccctagcaacccag

SEQ ID NO: 7141 - DNA, 33 bp, Homo sapiens
ttagaataagtaccaaytggagcatctagcatc

SEQ ID NO: 7142 - DNA, 33 bp, Homo sapiens
gatggttacactaaaakctgatctcaccactag

SEQ ID NO: 7143 - DNA, 33 bp, Homo sapiens
gatgtatttttcttgcrcctttgtcccagccat

SEQ ID NO: 7144 - DNA, 33 bp, Homo sapiens
gatgtgtcattagaaaktcagctggttttctca

SEQ ID NO: 7145 - DNA, 33 bp, Homo sapiens
gatgttaaaattaaaaygtgtactgtcttgttt

SEQ ID NO: 7146 - DNA, 33 bp, Homo sapiens
gatgttaggggtgctayagtacctgaggatgga

SEQ ID NO: 7147 - DNA, 33 bp, Homo sapiens
gattaatatcttatccsatctgtaagtgctgtt

SEQ ID NO: 7148 - DNA, 33 bp, Homo sapiens
gattcacagaagagacracaagtgaattggatc

SEQ ID NO: 7149 - DNA, 33 bp, Homo sapiens
gattctgggtccttcayaggtaggttaatgtgg

SEQ ID NO: 7150 - DNA, 33 bp, Homo sapiens
gatttctgaggttgctyaagagaagactcagca

SEQ ID NO: 7151 - DNA, 33 bp, Homo sapiens
gatttggaacatagacrctcttacatttgttag

SEQ ID NO: 7152 - DNA, 33 bp, Homo sapiens
gcaaatgagtaaagacygctatacacatcctat

SEQ ID NO: 7153 - DNA, 33 bp, Homo sapiens
gcaacaaggacagtcayagtttgctaaacaaaa

SEQ ID NO: 7154 - DNA, 33 bp, Homo sapiens
gcaacctctgacatcayggctaacattaatcca

SEQ ID NO: 7155 - DNA, 33 bp, Homo sapiens
gcaactgaaaaaatcayggtttcagactttgca

SEQ ID NO: 7156 - DNA, 33 bp, Homo sapiens
gcaaggcttgatcttgyagcacaaaatgtttga

SEQ ID NO: 7157 - DNA, 33 bp, Homo sapiens
gcaatattcctcttccraagcttgattaacaaa

SEQ ID NO: 7158 - DNA, 33 bp, Homo sapiens
tgaaagcagcagaaacygactggggctataact

SEQ ID NO: 7159 - DNA, 33 bp, Homo sapiens
gcaattgtttttgacaytggacatgatataata

SEQ ID NO: 7160 - DNA, 33 bp, Homo sapiens
gcacacctacgccatayggtatgcttgagagcc

SEQ ID NO: 7161 - DNA, 33 bp, Homo sapiens
ctttgaaagactgacasagtaaagaaggcagat

SEQ ID NO: 7162 - DNA, 33 bp, Homo sapiens
gcacagtcctaatacaycatatatgcttgggtg

SEQ ID NO: 7163 - DNA, 33 bp, Homo sapiens
gcactgcgcatagccaratccataggtcttaat

SEQ ID NO: 7164 - DNA, 33 bp, Homo sapiens
gcagaatttcctgtcartctatcctaggatggt

SEQ ID NO: 7165 - DNA, 33 bp, Homo sapiens
gcagactggacgaaacratcactcctatttgta

SEQ ID NO: 7166 - DNA, 33 bp, Homo sapiens
gcagcaaggccagatcratacgatgaaaaacaa

SEQ ID NO: 7167 - DNA, 33 bp, Homo sapiens
gcagctcctgaaacgaracagtgttcagcctgt

SEQ ID NO: 7168 - DNA, 33 bp, Homo sapiens
gcaggagactctaacakctcgtggtccaattcc

SEQ ID NO: 7169 - DNA, 33 bp, Homo sapiens
gcaggattcttgaaatyatagagctggaagggg

SEQ ID NO: 7170 - DNA, 33 bp, Homo sapiens
gcatagtcagagtgatwaaaagataaaactgct

SEQ ID NO: 7171 - DNA, 33 bp, Homo sapiens
gcatccttccagatcasagagtttagagcatcc

SEQ ID NO: 7172 - DNA, 33 bp, Homo sapiens
gcatgatggattggcayaaaggaggtaaagtag

SEQ ID NO: 7173 - DNA, 33 bp, Homo sapiens
gcatggacttcccacawatgtttctgtagcatt

SEQ ID NO: 7174 - DNA, 33 bp, Homo sapiens
gcatgtgtttacttaaygagctactttcagatc

SEQ ID NO: 7175 - DNA, 33 bp, Homo sapiens
gccacacataactaccragtgcctgctgtgtgc

SEQ ID NO: 7176 - DNA, 33 bp, Homo sapiens
gccagctcttgaaaatkacgcctcttacactag

SEQ ID NO: 7177 - DNA, 33 bp, Homo sapiens
gccaggacagttaaacraaaccatcatcacctc

SEQ ID NO: 7178 - DNA, 33 bp, Homo sapiens
gccatcctgtagcttckctgctatatttttatt

SEQ ID NO: 7179 - DNA, 33 bp, Homo sapiens
gccatggtaataagtascatcctgaatcagatt

SEQ ID NO: 7180 - DNA, 33 bp, Homo sapiens
gcccagactttaccacyatgcaatacatccatg

SEQ ID NO: 7181 - DNA, 33 bp, Homo sapiens
gcccagcattaggtagrccgtgttaaattagca

SEQ ID NO: 7182 - DNA, 33 bp, Homo sapiens
gcccagccataggttcmcgtaactattctgagc

SEQ ID NO: 7183 - DNA, 33 bp, Homo sapiens
gcccagggcctaaaacrgtcagcacaaagcctc

SEQ ID NO: 7184 - DNA, 33 bp, Homo sapiens
gcccctcagctgtaaaytccagaagggtctatg

SEQ ID NO: 7185 - DNA, 33 bp, Homo sapiens
gccctgcagctgccgakaggtgcaaggagatgc

SEQ ID NO: 7186 - DNA, 33 bp, Homo sapiens
gcctaatcctcagcaamtgttctaccactcgca

SEQ ID NO: 7187 - DNA, 33 bp, Homo sapiens
gcctacatcaaagtaargctgtgagaatgaaat

SEQ ID NO: 7188 - DNA, 33 bp, Homo sapiens
gcctcagacatttgtascaccgttagtcctgcc

SEQ ID NO: 7189 - DNA, 33 bp, Homo sapiens
gcctcaggaacaaagasaaaaaattgacaggct

SEQ ID NO: 7190 - DNA, 33 bp, Homo sapiens
gcctcctcttactctaygacccttggttctgtt

SEQ ID NO: 7191 - DNA, 33 bp, Homo sapiens
gcctctatcctaagagycccacgtttatttcta

SEQ ID NO: 7192 - DNA, 33 bp, Homo sapiens
gcctcttaggtagtaaraataatgcagaagtac

SEQ ID NO: 7193 - DNA, 33 bp, Homo sapiens
gcctgcagttaaggagrcctggagagcagccgg

SEQ ID NO: 7194 - DNA, 33 bp, Homo sapiens
gccttgggttgcactaygaaacttacacaactg

SEQ ID NO: 7195 - DNA, 33 bp, Homo sapiens
gccttgggtttccccakgtcgttctagcctgag

SEQ ID NO: 7196 - DNA, 33 bp, Homo sapiens
gcgatccaaggagcgarccagtgcgccaacagt

SEQ ID NO: 7197 - DNA, 33 bp, Homo sapiens
gcggacccaatgtaatmagaagcatctgtatga

SEQ ID NO: 7198 - DNA, 33 bp, Homo sapiens
gctacagcgaagagatsacatgaggaagtcaag

SEQ ID NO: 7199 - DNA, 33 bp, Homo sapiens
gctagggaggagcagaycttgtttaaacatttg

SEQ ID NO: 7200 - DNA, 33 bp, Homo sapiens
gctattttcattgctartaacatcaggccttta

SEQ ID NO: 7201 - DNA, 33 bp, Homo sapiens
gctcactgacaaaataraacaggcggaggccat

SEQ ID NO: 7202 - DNA, 33 bp, Homo sapiens
gctcagtccaaaaggakgcttatatctggctta

SEQ ID NO: 7203 - DNA, 33 bp, Homo sapiens
gctcttcattcagttcyctgttagatgtcacct

SEQ ID NO: 7204 - DNA, 33 bp, Homo sapiens
gctgcagcaccgtttaygatagcaaagacacgg

SEQ ID NO: 7205 - DNA, 33 bp, Homo sapiens
gctgccataacagtatyacaaattgggtgactt

SEQ ID NO: 7206 - DNA, 33 bp, Homo sapiens
gctggcaatgtgaacakggagcttgactgtcaa

SEQ ID NO: 7207 - DNA, 33 bp, Homo sapiens
gctggcacattggtaamattaagcaatggcagg

SEQ ID NO: 7208 - DNA, 33 bp, Homo sapiens
gctgtagagcctggaakaatcaacttagaatct

SEQ ID NO: 7209 - DNA, 33 bp, Homo sapiens
gctgtgagcaccctacmaaatgaccaggtacag

SEQ ID NO: 7210 - DNA, 33 bp, Homo sapiens
gctgtggaagctctgamcttttagacttaacac

SEQ ID NO: 7211 - DNA, 33 bp, Homo sapiens
gctgtttacagtaacayaaggagtcacggtaac

SEQ ID NO: 7212 - DNA, 33 bp, Homo sapiens
gctgtttgcttcttcargtccagaaggggaatc

SEQ ID NO: 7213 - DNA, 33 bp, Homo sapiens
gcttaaagacaacacaraggctttggcaaactg

SEQ ID NO: 7214 - DNA, 33 bp, Homo sapiens
gcttacgagaacaagasgaatagctaattggag

SEQ ID NO: 7215 - DNA, 33 bp, Homo sapiens
gcttcacaggctataargtactacactgtggtc

SEQ ID NO: 7216 - DNA, 33 bp, Homo sapiens
gcttccatagtttgtayggcaaagtctactgtc

SEQ ID NO: 7217 - DNA, 33 bp, Homo sapiens
gcttctacattagacaygatcagccgaagaagg

SEQ ID NO: 7218 - DNA, 33 bp, Homo sapiens
gcttctgttttagcaaygggcagtctagctttc

SEQ ID NO: 7219 - DNA, 33 bp, Homo sapiens
gcttgattttaagtacrgatagttttacctgat

SEQ ID NO: 7220 - DNA, 33 bp, Homo sapiens
gcttgcaaaaattctasgttagccaggcatggt

SEQ ID NO: 7221 - DNA, 33 bp, Homo sapiens
gcttggctcttctgtayaaaaaaagacttttgc

SEQ ID NO: 7222 - DNA, 33 bp, Homo sapiens
gcttgtattttccttaygctatggttagatatt

SEQ ID NO: 7223 - DNA, 33 bp, Homo sapiens
ggaaacagggcagaacraactagcagcactcaa

SEQ ID NO: 7224 - DNA, 33 bp, Homo sapiens
ggaaagtactctccgayctaatttgtttcatag

SEQ ID NO: 7225 - DNA, 33 bp, Homo sapiens
ggaacatctcgagggcrgaagtcgtgttttttt

SEQ ID NO: 7226 - DNA, 33 bp, Homo sapiens
ggaactgctcaaatgaractcagcaagaaaggg

SEQ ID NO: 7227 - DNA, 33 bp, Homo sapiens
ggaagcaatgacatcamgttggggaaggagaag

SEQ ID NO: 7228 - DNA, 33 bp, Homo sapiens
ggaatatttttttatcrctgtccatgttttgaa

SEQ ID NO: 7229 - DNA, 33 bp, Homo sapiens
ggaatcagttatcatayagtcaattattactga

SEQ ID NO: 7230 - DNA, 33 bp, Homo sapiens
ggaatgacctgtagccrattcccagagcaaggt

SEQ ID NO: 7231 - DNA, 33 bp, Homo sapiens
ggaattgattttccaargtctgtgcctacatgg

SEQ ID NO: 7232 - DNA, 33 bp, Homo sapiens
ggacactcttcattgasgagagcaaagacagac

SEQ ID NO: 7233 - DNA, 33 bp, Homo sapiens
ggactgaaattgatgcrgatgcaaaatagcatt

SEQ ID NO: 7234 - DNA, 33 bp, Homo sapiens
ggactgaattatgtaaygtcataaaccaacact

SEQ ID NO: 7235 - DNA, 33 bp, Homo sapiens
ggagacaggctggacayagcaaaatcttgcctc

SEQ ID NO: 7236 - DNA, 33 bp, Homo sapiens
ggagagagcaggaagcrctgggaaatagcacgt

SEQ ID NO: 7237 - DNA, 33 bp, Homo sapiens
ggagatgtaaaaatgaytaacacacagtcttta

SEQ ID NO: 7238 - DNA, 33 bp, Homo sapiens
ggagttaccatgacaamgcaataacctagtttc

SEQ ID NO: 7239 - DNA, 33 bp, Homo sapiens
aactcacaaatatggcyactgatttttaacaaa

SEQ ID NO: 7240 - DNA, 33 bp, Homo sapiens
ggattccttcttctgaraacatctatattcttt

SEQ ID NO: 7241 - DNA, 33 bp, Homo sapiens
ggcatcatgaggatcasctgtgtatctgtacct

SEQ ID NO: 7242 - DNA, 33 bp, Homo sapiens
ggctaggaatgaataastgacttgctcagagtt

SEQ ID NO: 7243 - DNA, 33 bp, Homo sapiens
ggctccataattcttcrctgctctacgaaatct

SEQ ID NO: 7244 - DNA, 33 bp, Homo sapiens
ggctgtctttccaccaytacagcttcgctcgtg

SEQ ID NO: 7245 - DNA, 33 bp, Homo sapiens
ggcttccggcagcacartatcacctatgttcca

SEQ ID NO: 7246 - DNA, 33 bp, Homo sapiens
gggacacaagctttcaycaaagaagcaaatatc

SEQ ID NO: 7247 - DNA, 33 bp, Homo sapiens
ggtgaatctgtgtgaawctgggttccagatggg

SEQ ID NO: 7248 - DNA, 33 bp, Homo sapiens
ggtggggcttacactakgggacaccttgaaccc

SEQ ID NO: 7249 - DNA, 33 bp, Homo sapiens
gtaaacagggacaacartgggcatcgttagaga

SEQ ID NO: 7250 - DNA, 33 bp, Homo sapiens
gtaggaaaggggagacrccttattgatttgatt

SEQ ID NO: 7251 - DNA, 33 bp, Homo sapiens
gtagtacaggatgatayattgagaagaaaaaga

SEQ ID NO: 7252 - DNA, 33 bp, Homo sapiens
gtcaactaagcactaawccaaacaggagatttt

SEQ ID NO: 7253 - DNA, 33 bp, Homo sapiens
gtcatgccaggtgaaaraagaccacatactgta

SEQ ID NO: 7254 - DNA, 33 bp, Homo sapiens
gttagcaattagggagkagtgaaagaagcaagt

SEQ ID NO: 7255 - DNA, 33 bp, Homo sapiens
gttagcatttctcagargtccatagaatctgtc

SEQ ID NO: 7256 - DNA, 33 bp, Homo sapiens
gttgtacctacccaacragcattcctctcttct

SEQ ID NO: 7257 - DNA, 33 bp, Homo sapiens
tcaagtagttttgtgayggaagtaaattaaatg

SEQ ID NO: 7258 - DNA, 33 bp, Homo sapiens
gttttggaatactcaargctttccttggtcagt

SEQ ID NO: 7259 - DNA, 33 bp, Homo sapiens
taaaacctctgctggakaaaaagaaagggggac

SEQ ID NO: 7260 - DNA, 33 bp, Homo sapiens
taagcctcctcttcaarcacagtggcattgttc

SEQ ID NO: 7261 - DNA, 33 bp, Homo sapiens
taagcttgtattactayctaggcaatttttttt

SEQ ID NO: 7262 - DNA, 33 bp, Homo sapiens
taagggcaaaggatccraggcatttatagacca

SEQ ID NO: 7263 - DNA, 33 bp, Homo sapiens
tacagaatagctaaacwagaaagtggtacaggg

SEQ ID NO: 7264 - DNA, 33 bp, Homo sapiens
tactgctactatctggyatcacctattcaattc

SEQ ID NO: 7265 - DNA, 33 bp, Homo sapiens
tagatccctagcccaargttctgtctgcataga

SEQ ID NO: 7266 - DNA, 33 bp, Homo sapiens
tagggaaactgggttcyagaaaggactgatcat

SEQ ID NO: 7267 - DNA, 33 bp, Homo sapiens
gacgtgttaagttccayagataacaacaaagtc

SEQ ID NO: 7268 - DNA, 33 bp, Homo sapiens
tcagggtaaaataggaygaaaagagtaacagtg

SEQ ID NO: 7269 - DNA, 33 bp, Homo sapiens
tacttcatttgtcttamgtgtgtatttttggct

SEQ ID NO: 7270 - DNA, 33 bp, Homo sapiens
tcatggtgatgaagccrcagcaaatttccagag

SEQ ID NO: 7271 - DNA, 33 bp, Homo sapiens
caactgtcttacaggayggtaacaagataggca

SEQ ID NO: 7272 - DNA, 33 bp, Homo sapiens
tccctccataattccartgaaaaaccacttaat

SEQ ID NO: 7273 - DNA, 33 bp, Homo sapiens
tctgactttttccaacycccctgtatggtataa

SEQ ID NO: 7274 - DNA, 33 bp, Homo sapiens
tctggaggtttgggtaragaaaatcagtattaa

SEQ ID NO: 7275 - DNA, 33 bp, Homo sapiens
tgagagggaggatgaasagaggtaggctactgg

SEQ ID NO: 7276 - DNA, 33 bp, Homo sapiens
tgatattcactaggaaraagagttcctatcagc

SEQ ID NO: 7277 - DNA, 33 bp, Homo sapiens
tgccactaggctttggratgaaatagacctagg

SEQ ID NO: 7278 - DNA, 33 bp, Homo sapiens
tgggcaagtatacccasgtatttgtgttgttct

SEQ ID NO: 7279 - DNA, 33 bp, Homo sapiens
tgtatcatgattatgcmcttgtagatgtactga

SEQ ID NO: 7280 - DNA, 33 bp, Homo sapiens
aagttgcaatattccargtaagaaatcaggtgg

SEQ ID NO: 7281 - DNA, 33 bp, Homo sapiens
tgttgcctgctgagaaytgaaatactgaaagtt

SEQ ID NO: 7282 - DNA, 33 bp, Homo sapiens
ttagacaactttaaacyctgattcataaaaatg

SEQ ID NO: 7283 - DNA, 33 bp, Homo sapiens
ttatagtttggccccawcctttcctcttgcata

SEQ ID NO: 7284 - DNA, 33 bp, Homo sapiens
ttccatattcttgacartatttagacttatcca

SEQ ID NO: 7285 - DNA, 33 bp, Homo sapiens
tttgtgtcataacaaargtgaaatttctgatcc

SEQ ID NO: 7286 - DNA, 33 bp, Homo sapiens
ttttttttgtagagacrgagtgcatagtgaaag

SEQ ID NO: 7287 - DNA, 33 bp, Homo sapiens
agtattatcagcacctraacctgaaaagattta

SEQ ID NO: 7288 - DNA, 33 bp, Homo sapiens
tgtgcaagttggctacrgactgaatacaaatgt

SEQ ID NO: 7289 - DNA, 33 bp, Homo sapiens
tggctcttggaataaayacctcaaggtcaggaa

SEQ ID NO: 7290 - DNA, 33 bp, Homo sapiens
aaagtgtgaacaaaggyatcatttacaacattt

SEQ ID NO: 7291 - DNA, 33 bp, Homo sapiens
actaaatggaaagcacygtgcaaagaactggat

SEQ ID NO: 7292 - DNA, 33 bp, Homo sapiens
tctctgtgtgtgttacsggaagtccagaagtgc

SEQ ID NO: 7293 - DNA, 33 bp, Homo sapiens
gagaactatacatctamgtcatagctctacaca

SEQ ID NO: 7294 - DNA, 33 bp, Homo sapiens
ggtaaatatgagaaaaraatagttagcgtttgg

SEQ ID NO: 7295 - DNA, 33 bp, Homo sapiens
gggcttgtcaaatggarccttccgcactccctc

SEQ ID NO: 7296 - DNA, 33 bp, Homo sapiens
cacctaactcaacacartgtaatttgcagaaaa

SEQ ID NO: 7297 - DNA, 33 bp, Homo sapiens
agtatcacagtcatgayaattagctgtacagct

SEQ ID NO: 7298 - DNA, 33 bp, Homo sapiens
cgtatctcaagttgtayaagtttgctgcacaga

SEQ ID NO: 7299 - DNA, 33 bp, Homo sapiens
aaattttaaaagaggcycatgatatattagtca

SEQ ID NO: 7300 - DNA, 33 bp, Homo sapiens
agaaatgaagtctcacrcagataaaataagtca

SEQ ID NO: 7301 - DNA, 33 bp, Homo sapiens
tgaggctccgattgtayttctaataagctccca

SEQ ID NO: 7302 - DNA, 33 bp, Homo sapiens
tagctaagaagtagctragccatgatacaaact

SEQ ID NO: 7303 - DNA, 33 bp, Homo sapiens
ggcttgaggaataatgmaacgtgatctcaagac

SEQ ID NO: 7304 - DNA, 33 bp, Homo sapiens
cccggattatgctgaaraagaggcagggtaggg

SEQ ID NO: 7305 - DNA, 33 bp, Homo sapiens
atttgatgaaaacttcmaatacatagatctaac

SEQ ID NO: 7306 - DNA, 33 bp, Homo sapiens
caaaaggaatccaataygtgcattgtgaagcca

SEQ ID NO: 7307 - DNA, 33 bp, Homo sapiens
gttcccttaatacttamccatggatgtgtttgc

SEQ ID NO: 7308 - DNA, 33 bp, Homo sapiens
atggtgaacttcctacrggcttagaaaatttgt

SEQ ID NO: 7309 - DNA, 33 bp, Homo sapiens
tttaatgccaaagcagraagggtcaaattgatt

SEQ ID NO: 7310 - DNA, 33 bp, Homo sapiens
tttagaaacttctgaaytgatattacattgcca

SEQ ID NO: 7311 - DNA, 33 bp, Homo sapiens
agcatttgcttaatcaraaggaacagtgcacca

SEQ ID NO: 7312 - DNA, 33 bp, Homo sapiens
gttattccccatattgygatggtagtagaaacc

SEQ ID NO: 7313 - DNA, 33 bp, Homo sapiens
tgagaacaccaaatacyagtgaagatgtagagt

SEQ ID NO: 7314 - DNA, 33 bp, Homo sapiens
gaaatgggattagtcakcctgacagattattga

SEQ ID NO: 7315 - DNA, 33 bp, Homo sapiens
tttgaatcatccaaaakccatctgaatacacat

SEQ ID NO: 7316 - DNA, 33 bp, Homo sapiens
aaaggcgcctgccgcayatcttgaactgcggga

SEQ ID NO: 7317 - DNA, 33 bp, Homo sapiens
aaaaggtgagggatgaygatactgagcttttaa

SEQ ID NO: 7318 - DNA, 33 bp, Homo sapiens
aaagtcagattttccayggagtcttcatcaacc

SEQ ID NO: 7319 - DNA, 33 bp, Homo sapiens
aaatatggctttttcarctcattatatttcttc

SEQ ID NO: 7320 - DNA, 33 bp, Homo sapiens
ggaaattaggatactargatactacagtcagtg

SEQ ID NO: 7321 - DNA, 33 bp, Homo sapiens
aacataacctgttttaygtgagaaaataggaag

SEQ ID NO: 7322 - DNA, 33 bp, Homo sapiens
aaccagctcttgaagayagtctcagagcctaga

SEQ ID NO: 7323 - DNA, 33 bp, Homo sapiens
aaccagtgaaggccagratgcctcaaaggtccc

SEQ ID NO: 7324 - DNA, 33 bp, Homo sapiens
aactcagattctctacsactttaaaatttattg

SEQ ID NO: 7325 - DNA, 33 bp, Homo sapiens
aagaagtccttagaaargaatgcttgagctaac

SEQ ID NO: 7326 - DNA, 33 bp, Homo sapiens
aagaatgaatggatgayacctagcagttcattt

SEQ ID NO: 7327 - DNA, 33 bp, Homo sapiens
aagaggtctgacttaawagttttctgtgtgtca

SEQ ID NO: 7328 - DNA, 33 bp, Homo sapiens
aaggatttgaaatgcarcttaatcaaaatgaaa

SEQ ID NO: 7329 - DNA, 33 bp, Homo sapiens
aagtcatttaataccaytgagcttgtttactca

SEQ ID NO: 7330 - DNA, 33 bp, Homo sapiens
aataaattggaaaaaamatgaattggaaacacc

SEQ ID NO: 7331 - DNA, 33 bp, Homo sapiens
aatagctgctactaacyagtcctcctcacaccc

SEQ ID NO: 7332 - DNA, 33 bp, Homo sapiens
aatagttttgttcataygctggttcttgccctg

SEQ ID NO: 7333 - DNA, 33 bp, Homo sapiens
aatcctagctcagtcamtacattgttgcatgat

SEQ ID NO: 7334 - DNA, 33 bp, Homo sapiens
aatgctgaacaaaaccwcattattgatttgatg

SEQ ID NO: 7335 - DNA, 33 bp, Homo sapiens
aattacaattaaaccaytgatatttccgtgaga

SEQ ID NO: 7336 - DNA, 33 bp, Homo sapiens
tgggagagatgaatagyacaccgggctaaacat

SEQ ID NO: 7337 - DNA, 33 bp, Homo sapiens
acatatactgtaataamgcttgaaaatcacaaa

SEQ ID NO: 7338 - DNA, 33 bp, Homo sapiens
acctggtgaaactgaawatgtgtatgcccttta

SEQ ID NO: 7339 - DNA, 33 bp, Homo sapiens
actatgtgagatgacaratccattaatctgctt

SEQ ID NO: 7340 - DNA, 33 bp, Homo sapiens
actattcaggtgagaaraaacaggtaataagca

SEQ ID NO: 7341 - DNA, 33 bp, Homo sapiens
actcaaaccactcaggrcccattttccaacatt

SEQ ID NO: 7342 - DNA, 33 bp, Homo sapiens
actggaaatgacttaawagtggttaaaatggta

SEQ ID NO: 7343 - DNA, 33 bp, Homo sapiens
agaaaataatttccaamgcagaattttcgtatc

SEQ ID NO: 7344 - DNA, 33 bp, Homo sapiens
agaattgctaggatacmggatacacataggtac

SEQ ID NO: 7345 - DNA, 33 bp, Homo sapiens
agacccaggcaggtgaygcttgttaacctcatt

SEQ ID NO: 7346 - DNA, 33 bp, Homo sapiens
agagaccccaggtcacsgattacaaggtgccac

SEQ ID NO: 7347 - DNA, 33 bp, Homo sapiens
agcaaccttctttgcamctgcagccttagagcc

SEQ ID NO: 7348 - DNA, 33 bp, Homo sapiens
aactactaacttgacawcacagaatatggggct

SEQ ID NO: 7349 - DNA, 33 bp, Homo sapiens
aggagtctagtgtgaayagcatttgcttatcct

SEQ ID NO: 7350 - DNA, 33 bp, Homo sapiens
agggccttataaatgcyaatattacctgctggc

SEQ ID NO: 7351 - DNA, 33 bp, Homo sapiens
agtatggatctcttgcyaagctaagaaaagtga

SEQ ID NO: 7352 - DNA, 33 bp, Homo sapiens
agtgaacagatattaaraagtgtatattgcaat

SEQ ID NO: 7353 - DNA, 33 bp, Homo sapiens
agtttctgagtgccaasagtgttctctgtttta

SEQ ID NO: 7354 - DNA, 33 bp, Homo sapiens
ataatggtgtctggtaragatataatggagctg

SEQ ID NO: 7355 - DNA, 33 bp, Homo sapiens
atagagcaggtagtccygaaagtgacccaggac

SEQ ID NO: 7356 - DNA, 33 bp, Homo sapiens
atattaatctagaccaygcagtgctggtaaaga

SEQ ID NO: 7357 - DNA, 33 bp, Homo sapiens
atcaaatatagttgtaraatttcatgacagtct

SEQ ID NO: 7358 - DNA, 33 bp, Homo sapiens
atcactgtgacagatcsaatgatgggtatcaag

SEQ ID NO: 7359 - DNA, 33 bp, Homo sapiens
atcatatatctgctaarggatcactattcagaa

SEQ ID NO: 7360 - DNA, 33 bp, Homo sapiens
atcctgtgaccctctamagttaccacaatttta

SEQ ID NO: 7361 - DNA, 33 bp, Homo sapiens
atgaaaattcctgtaarggtgtaaaaggaccat

SEQ ID NO: 7362 - DNA, 33 bp, Homo sapiens
atgaattatgctcaggracaatgacttaaactg

SEQ ID NO: 7363 - DNA, 33 bp, Homo sapiens
atgtatattaagagtartaacactgatgacact

SEQ ID NO: 7364 - DNA, 33 bp, Homo sapiens
atgtggaaacttttacyacgaattaggaagaac

SEQ ID NO: 7365 - DNA, 33 bp, Homo sapiens
atgttctttttgattcrccatcactaggttctt

SEQ ID NO: 7366 - DNA, 33 bp, Homo sapiens
attctcaggcctacaargtctcagtagataatg

SEQ ID NO: 7367 - DNA, 33 bp, Homo sapiens
atttgctgttatccacrgtcactcagctaaacc

SEQ ID NO: 7368 - DNA, 33 bp, Homo sapiens
atttggtaactataggyacgacgttgcacagaa

SEQ ID NO: 7369 - DNA, 33 bp, Homo sapiens
caacaccctgtgcatgraaagctacaatcccag

SEQ ID NO: 7370 - DNA, 33 bp, Homo sapiens
caactaaactgataaaytgatctgtggcatgaa

SEQ ID NO: 7371 - DNA, 33 bp, Homo sapiens
cacaacttgtatcttaygtatctattaggcatg

SEQ ID NO: 7372 - DNA, 33 bp, Homo sapiens
acttaaaaaaaaatcarcatactgagatataca

SEQ ID NO: 7373 - DNA, 33 bp, Homo sapiens
cacatggagtattttcyagaatagaccatatct

SEQ ID NO: 7374 - DNA, 33 bp, Homo sapiens
cagtagaataatagtgyatgagttattgtgaca

SEQ ID NO: 7375 - DNA, 33 bp, Homo sapiens
cactagccagaacccarataatgactgcattta

SEQ ID NO: 7376 - DNA, 33 bp, Homo sapiens
cactgaccctctctgarcctcattctcaagggt

SEQ ID NO: 7377 - DNA, 33 bp, Homo sapiens
catataggagatatcakaatcaccttcttggga

SEQ ID NO: 7378 - DNA, 33 bp, Homo sapiens
cattaggccctatttaygcctgcaacaatccaa

SEQ ID NO: 7379 - DNA, 33 bp, Homo sapiens
cattttcaagttgaacyaaacaatggaagaaaa

SEQ ID NO: 7380 - DNA, 33 bp, Homo sapiens
ccatgcagattcccacwgtgagatgtgttggac

SEQ ID NO: 7381 - DNA, 33 bp, Homo sapiens
cctgactgcccttcccyggacaggttctgtttg

SEQ ID NO: 7382 - DNA, 33 bp, Homo sapiens
cgcagtagctctcaaargagaccttagactgcc

SEQ ID NO: 7383 - DNA, 33 bp, Homo sapiens
ctagacagctgaatcaygttagactctataatt

SEQ ID NO: 7384 - DNA, 33 bp, Homo sapiens
ctcagaactcagtaagyatttgccagatgaatg

SEQ ID NO: 7385 - DNA, 33 bp, Homo sapiens
ctcctaaatggattaaytgatgtttccttaaga

SEQ ID NO: 7386 - DNA, 33 bp, Homo sapiens
ctcttgttagatagcasagtcattttcaaagtg

SEQ ID NO: 7387 - DNA, 33 bp, Homo sapiens
ctgggctttgctggacrcgctttctgtcgtgca

SEQ ID NO: 7388 - DNA, 33 bp, Homo sapiens
ctgtttggtgagggtckcttttcccctcctctt

SEQ ID NO: 7389 - DNA, 33 bp, Homo sapiens
cttgtgaaccctggcayaatcgatacacatttt

SEQ ID NO: 7390 - DNA, 33 bp, Homo sapiens
ctttaaggaaatgatayggctccaaggccaggg

SEQ ID NO: 7391 - DNA, 33 bp, Homo sapiens
gacagctataattccaragggaacaggacactg

SEQ ID NO: 7392 - DNA, 33 bp, Homo sapiens
gagaaaagatgagaaargagtgggcactgaaca

SEQ ID NO: 7393 - DNA, 33 bp, Homo sapiens
gagcaacaaaatgcggraaaaaaatctatcttt

SEQ ID NO: 7394 - DNA, 33 bp, Homo sapiens
gagttatttggctttaraaaaccacacaacttg

SEQ ID NO: 7395 - DNA, 33 bp, Homo sapiens
gagtttagaaatgaaastgtaggtagatcacag

SEQ ID NO: 7396 - DNA, 33 bp, Homo sapiens
gatacaagactatagamtcaagaagaccttgtt

SEQ ID NO: 7397 - DNA, 33 bp, Homo sapiens
gatctatttctccttayggttctcagtttttgc

SEQ ID NO: 7398 - DNA, 33 bp, Homo sapiens
gatgtcaagcatcagcmgaacattttggaaaaa

SEQ ID NO: 7399 - DNA, 33 bp, Homo sapiens
gccagtaaagcacagcragagtagtagaggcta

SEQ ID NO: 7400 - DNA, 33 bp, Homo sapiens
gccctgttaggaggcayaggggcttatccatgc

SEQ ID NO: 7401 - DNA, 33 bp, Homo sapiens
gctattgcagcacaaakaaagatgtctgcatca

SEQ ID NO: 7402 - DNA, 33 bp, Homo sapiens
ggacgcactcactctcrgaaggggaggaagatc

SEQ ID NO: 7403 - DNA, 33 bp, Homo sapiens
ggagaatcacctgaatyagggaagcagaggtta

SEQ ID NO: 7404 - DNA, 33 bp, Homo sapiens
ggagctatactaggaamccttgaagaaaacacc

SEQ ID NO: 7405 - DNA, 33 bp, Homo sapiens
ggattggctgaaaaaawtctctgaggtgtgatt

SEQ ID NO: 7406 - DNA, 33 bp, Homo sapiens
ggcccccaccagatacmctttaatctgccaggc

SEQ ID NO: 7407 - DNA, 33 bp, Homo sapiens
ggcctgcatcgatcacygaaatagcagatgtga

SEQ ID NO: 7408 - DNA, 33 bp, Homo sapiens
gggaagactttgtgcaytgagacttagacaagt

SEQ ID NO: 7409 - DNA, 33 bp, Homo sapiens
gggatgtgtgtccttasatctgtgagaggtcct

SEQ ID NO: 7410 - DNA, 33 bp, Homo sapiens
gggattacatttaggakctacatggataatcca

SEQ ID NO: 7411 - DNA, 33 bp, Homo sapiens
ggggtgtgaagaagaaracctggaatccgactt

SEQ ID NO: 7412 - DNA, 33 bp, Homo sapiens
gggtgaggacactgaarggtgaagggtgaaaga

SEQ ID NO: 7413 - DNA, 33 bp, Homo sapiens
gggttagaatggatatraaacatgaggtaggaa

SEQ ID NO: 7414 - DNA, 33 bp, Homo sapiens
gtacaatgtctaaaggmatggttttagcttgct

SEQ ID NO: 7415 - DNA, 33 bp, Homo sapiens
gtagtaaaactccttakgctgattgcttagggg

SEQ ID NO: 7416 - DNA, 33 bp, Homo sapiens
gtcaggaactgcagtcraagttcaaatattaga

SEQ ID NO: 7417 - DNA, 33 bp, Homo sapiens
gtcggatatgcaaataygggccttcagacgctc

SEQ ID NO: 7418 - DNA, 33 bp, Homo sapiens
gtgacactggatgttgyaagacaaagggcctgg

SEQ ID NO: 7419 - DNA, 33 bp, Homo sapiens
gtgactgccccgctcargacaacaagcttacct

SEQ ID NO: 7420 - DNA, 33 bp, Homo sapiens
gtgattatttatatgawaaagagcacaaacatt

SEQ ID NO: 7421 - DNA, 33 bp, Homo sapiens
gtggtggctttggcaayaggtgaagtttggggg

SEQ ID NO: 7422 - DNA, 33 bp, Homo sapiens
gtgtggcctgagatgaygatcacaaggacacaa

SEQ ID NO: 7423 - DNA, 33 bp, Homo sapiens
gtgtgtttgaagggaayggcccttgatgagaca

SEQ ID NO: 7424 - DNA, 33 bp, Homo sapiens
gtgttcacacattcacmcttctccatagtgact

SEQ ID NO: 7425 - DNA, 33 bp, Homo sapiens
aggtaatctaaaatacraaatagttggctgtct

SEQ ID NO: 7426 - DNA, 33 bp, Homo sapiens
taatcattaggcttccyagagattttcgcctgt

SEQ ID NO: 7427 - DNA, 33 bp, Homo sapiens
taattaaggtaccttayctaagatttcagcact

SEQ ID NO: 7428 - DNA, 33 bp, Homo sapiens
taccaaagtaaagtagragcagttaattcaaga

SEQ ID NO: 7429 - DNA, 33 bp, Homo sapiens
tagaatctgttttacayagaagcaaaatgaaac

SEQ ID NO: 7430 - DNA, 33 bp, Homo sapiens
tagtgccagggaagcarcgggggttctcacgta

SEQ ID NO: 7431 - DNA, 33 bp, Homo sapiens
tatactttacctttccyacaacaagggcacgta

SEQ ID NO: 7432 - DNA, 33 bp, Homo sapiens
tatccttagtaacatamactgaaggttttagga

SEQ ID NO: 7433 - DNA, 33 bp, Homo sapiens
tatgtcttcaaaaccaytccagtgtgatttcac

SEQ ID NO: 7434 - DNA, 33 bp, Homo sapiens
tattttctgaattagaragcctggagcaggggt

SEQ ID NO: 7435 - DNA, 33 bp, Homo sapiens
tcaaatggcctaaacaraagtcctcctactccc

SEQ ID NO: 7436 - DNA, 33 bp, Homo sapiens
tcacagagctcgcaaaktcccacctgttcgtcc

SEQ ID NO: 7437 - DNA, 33 bp, Homo sapiens
tcagccagagagcagcraatgttaaggctggag

SEQ ID NO: 7438 - DNA, 33 bp, Homo sapiens
ttagttccactgcctcyagctttccctacacaa

SEQ ID NO: 7439 - DNA, 33 bp, Homo sapiens
tccagaaatctataaamacccggaaatgactgg

SEQ ID NO: 7440 - DNA, 33 bp, Homo sapiens
tctagaagccaagttcycttttcctatatttaa

SEQ ID NO: 7441 - DNA, 33 bp, Homo sapiens
tctagggtattcatgaygagggaaacagaacat

SEQ ID NO: 7442 - DNA, 33 bp, Homo sapiens
tctgaactgaggacgcratatatttcatggcct

SEQ ID NO: 7443 - DNA, 33 bp, Homo sapiens
tctgcccattttaaaarcatcatatttagaaat

SEQ ID NO: 7444 - DNA, 33 bp, Homo sapiens
tcttctcagggaactaracaggggctgctggtt

SEQ ID NO: 7445 - DNA, 33 bp, Homo sapiens
tgaagccttcacagaayatgtagtgtttaagta

SEQ ID NO: 7446 - DNA, 33 bp, Homo sapiens
tgactacaaagagtacyggactggctctggaga

SEQ ID NO: 7447 - DNA, 33 bp, Homo sapiens
tgagtctgtctccaccyagagaaaagttgcctg

SEQ ID NO: 7448 - DNA, 33 bp, Homo sapiens
tgccagtccactatgcyaacttctgattaaccc

SEQ ID NO: 7449 - DNA, 33 bp, Homo sapiens
tggacatcgagaaaacrgaaccctcatctggcc

SEQ ID NO: 7450 - DNA, 33 bp, Homo sapiens
tggattggactcagatragatgagtaaatgcaa

SEQ ID NO: 7451 - DNA, 33 bp, Homo sapiens
tggcctcatggttaaayataccattcattcgac

SEQ ID NO: 7452 - DNA, 33 bp, Homo sapiens
tggcgtgctcctaacaratgttcagacagaagg

SEQ ID NO: 7453 - DNA, 33 bp, Homo sapiens
tgggagccgtgggatcrgaacagagtgttctag

SEQ ID NO: 7454 - DNA, 33 bp, Homo sapiens
tggtcagttctacctgmaggtgttgagcctgta

SEQ ID NO: 7455 - DNA, 33 bp, Homo sapiens
tggtcattctgttagayactatagtgagaccag

SEQ ID NO: 7456 - DNA, 33 bp, Homo sapiens
tggtgtctgatgtctckcactaagcatggcatc

SEQ ID NO: 7457 - DNA, 33 bp, Homo sapiens
ttaaggccgtgattgamatcaaaacaatctaga

SEQ ID NO: 7458 - DNA, 33 bp, Homo sapiens
ttaccccaatttgttgmagcatatttgtcaggc

SEQ ID NO: 7459 - DNA, 33 bp, Homo sapiens
ttacttccccaagttcrcagatatgtttttagg

SEQ ID NO: 7460 - DNA, 33 bp, Homo sapiens
ttcaagagggcgttcaraaacaaaagagaatgc

SEQ ID NO: 7461 - DNA, 33 bp, Homo sapiens
ttcaatagcttcctcakcaactagcaataacca

SEQ ID NO: 7462 - DNA, 33 bp, Homo sapiens
ttcattccttactgaartgtgctcctcctaacc

SEQ ID NO: 7463 - DNA, 33 bp, Homo sapiens
ttccaatcttttcttcmattgccacagagcatc

SEQ ID NO: 7464 - DNA, 33 bp, Homo sapiens
ttgatgtttgatgttaygggcagagaaaaatac

SEQ ID NO: 7465 - DNA, 33 bp, Homo sapiens
tttacttcatccataayagagtgggacgcattg

SEQ ID NO: 7466 - DNA, 33 bp, Homo sapiens
tttagggggcctcttcmagaaaaagaattttaa

SEQ ID NO: 7467 - DNA, 33 bp, Homo sapiens
tttatatggcagacagratgaatgaggatacat

SEQ ID NO: 7468 - DNA, 33 bp, Homo sapiens
ttttaaatatccatacratgcaatactactcag

SEQ ID NO: 7469 - DNA, 33 bp, Homo sapiens
ttttcttttcttctccrcgactgaacagattta

SEQ ID NO: 7470 - DNA, 33 bp, Homo sapiens
gtgtggatccaatggtsaccctttaggcagtgg

SEQ ID NO: 7471 - DNA, 33 bp, Homo sapiens
tggagaccctagcggaraggggttcaacatgta

SEQ ID NO: 7472 - DNA, 33 bp, Homo sapiens
ctctcccactttattcrgaagttcatatgagcc

SEQ ID NO: 7473 - DNA, 33 bp, Homo sapiens
ccaaatcactcactaaytggcaagtagtaatag

SEQ ID NO: 7474 - DNA, 33 bp, Homo sapiens
tgaccagaaaggagacmctgtttccacacggcc

SEQ ID NO: 7475 - DNA, 33 bp, Homo sapiens
ctcagtgaatgggaaayggaattaaatatatct

SEQ ID NO: 7476 - DNA, 33 bp, Homo sapiens
ctcaaagactcacataygacagcggacaaatct

SEQ ID NO: 7477 - DNA, 33 bp, Homo sapiens
aaaagaggaaagactayaatgcagagtagaaaa

SEQ ID NO: 7478 - DNA, 33 bp, Homo sapiens
gttaaatatgtaaccamatgtctcagtagagaa

SEQ ID NO: 7479 - DNA, 33 bp, Homo sapiens
tctagaaacccaggaaygtatctgtgctgcagc

SEQ ID NO: 7480 - DNA, 33 bp, Homo sapiens
tctaaccagtaaagagraccacctgtaattatg

SEQ ID NO: 7481 - DNA, 33 bp, Homo sapiens
aaaaagatgaaagatgyatgctaaaatcaggct

SEQ ID NO: 7482 - DNA, 33 bp, Homo sapiens
cttgatagtttttagaraattcactttcagcct

SEQ ID NO: 7483 - DNA, 33 bp, Homo sapiens
taacctctagataagcrcctgtccagaggttct

SEQ ID NO: 7484 - DNA, 33 bp, Homo sapiens
gactttagccaggaatkagtgttaggaaagagg

SEQ ID NO: 7485 - DNA, 33 bp, Homo sapiens
gggttttgattttgatyagagaaaattagaaca

SEQ ID NO: 7486 - DNA, 33 bp, Homo sapiens
tgtgtgtctaaggaccrgaaataatctccatga

SEQ ID NO: 7487 - DNA, 33 bp, Homo sapiens
ttttgctaacgtaacaygtacctctctagggcc

SEQ ID NO: 7488 - DNA, 33 bp, Homo sapiens
gggaagaatccagtcaytatttggttcccagac

SEQ ID NO: 7489 - DNA, 33 bp, Homo sapiens
gctgaagcagaaatcarttatgcctgtgttgtt

SEQ ID NO: 7490 - DNA, 33 bp, Homo sapiens
gcaagagtgagagatascttaaattatgccttt

SEQ ID NO: 7491 - DNA, 33 bp, Homo sapiens
ggacataaaaatatcartaagacagctttccct

SEQ ID NO: 7492 - DNA, 33 bp, Homo sapiens
tatgtcttcaccttgtyaaatcagtcagagaga

SEQ ID NO: 7493 - DNA, 33 bp, Homo sapiens
gcggacagttgtcagtwaattgtggcctcagcc

SEQ ID NO: 7494 - DNA, 33 bp, Homo sapiens
caggcctgctttatcaytgagcttgaatcttaa

SEQ ID NO: 7495 - DNA, 33 bp, Homo sapiens
ctaatcattctgttgckactgaagcattcattt

SEQ ID NO: 7496 - DNA, 33 bp, Homo sapiens
tgttttggaaataaacyggcatattagtaagtg

SEQ ID NO: 7497 - DNA, 33 bp, Homo sapiens
tatattaggtctcattraacagcccaatgaagc

SEQ ID NO: 7498 - DNA, 33 bp, Homo sapiens
tgggtctattcacatayccttactcacctgcag

SEQ ID NO: 7499 - DNA, 33 bp, Homo sapiens
actatgagatttagaaycaagttaggactgcag

SEQ ID NO: 7500 - DNA, 33 bp, Homo sapiens
acatttgcactgaagayaaatttctcactgact

SEQ ID NO: 7501 - DNA, 33 bp, Homo sapiens
aaagcaattgaacaaakatggggccacagatga

SEQ ID NO: 7502 - DNA, 33 bp, Homo sapiens
acttaaattcactctcygaccacctaaactcca

SEQ ID NO: 7503 - DNA, 33 bp, Homo sapiens
agataaaatgctaaggrcatgattcataaaata

SEQ ID NO: 7504 - DNA, 33 bp, Homo sapiens
ataccttcgatgtaaawtatattgtgctttgag

SEQ ID NO: 7505 - DNA, 33 bp, Homo sapiens
ctgggaacaactcagayattaattttgaaagca

SEQ ID NO: 7506 - DNA, 33 bp, Homo sapiens
cagtatgttgaaatacrgctaacaaaatgtaac

SEQ ID NO: 7507 - DNA, 33 bp, Homo sapiens
gaaacagtggaaactcrccctttgtaaaagcag

SEQ ID NO: 7508 - DNA, 33 bp, Homo sapiens
aaaaaaaccaggtcatsaggtataatctttgat

SEQ ID NO: 7509 - DNA, 33 bp, Homo sapiens
aaagccttacaggccamtgagtttgaaacccta

SEQ ID NO: 7510 - DNA, 33 bp, Homo sapiens
aacaagtgaccagccaragaaagacagcctagt

SEQ ID NO: 7511 - DNA, 33 bp, Homo sapiens
aactgagaatattcccraatttttgaacccatg

SEQ ID NO: 7512 - DNA, 33 bp, Homo sapiens
aagaacttacttcctasagggaaatcaggttcg

SEQ ID NO: 7513 - DNA, 33 bp, Homo sapiens
tgacttgaccttctcarctcgggcatccaatct

SEQ ID NO: 7514 - DNA, 33 bp, Homo sapiens
aagaccagcagctgtayattaagcactgaaatt

SEQ ID NO: 7515 - DNA, 33 bp, Homo sapiens
aagcactttgttgttckctaactccagtaggaa

SEQ ID NO: 7516 - DNA, 33 bp, Homo sapiens
aagcccattggtgtacrgagaatgatgtatgct

SEQ ID NO: 7517 - DNA, 33 bp, Homo sapiens
ccagtgtgaatccctayaatggaacacgttaaa

SEQ ID NO: 7518 - DNA, 33 bp, Homo sapiens
aacaagatgtcggcccwagttctctctctaaac

SEQ ID NO: 7519 - DNA, 33 bp, Homo sapiens
aagtttaaaaacaagasattgtacagaaagagg

SEQ ID NO: 7520 - DNA, 33 bp, Homo sapiens
aatctacaaggtgcagracaaaaggagcagcta

SEQ ID NO: 7521 - DNA, 33 bp, Homo sapiens
aatgttggtttatttcrcaggcgccctgaacga

SEQ ID NO: 7522 - DNA, 33 bp, Homo sapiens
aatgtttttaccctcayattttacagttagaga

SEQ ID NO: 7523 - DNA, 33 bp, Homo sapiens
acaagaaaaagctgaaytccttgatatgaacct

SEQ ID NO: 7524 - DNA, 33 bp, Homo sapiens
acacttgaaatgtatcwccccttcagttaatag

SEQ ID NO: 7525 - DNA, 33 bp, Homo sapiens
acagagttctcagggawaacgccgcgagtgttc

SEQ ID NO: 7526 - DNA, 33 bp, Homo sapiens
acatcaggggaaaaaarttgtagatgatgatgt

SEQ ID NO: 7527 - DNA, 33 bp, Homo sapiens
acattgagacgatgccygattttggcaactgcc

SEQ ID NO: 7528 - DNA, 33 bp, Homo sapiens
actaataacaacaatgrcaatagtaacaacagc

SEQ ID NO: 7529 - DNA, 33 bp, Homo sapiens
actataaaacctcacayagtcattattgaagtt

SEQ ID NO: 7530 - DNA, 33 bp, Homo sapiens
acttcctgttctgacasgtgcttttaacacttc

SEQ ID NO: 7531 - DNA, 33 bp, Homo sapiens
agaaaccctttgtggaygcctgtgcagatgctg

SEQ ID NO: 7532 - DNA, 33 bp, Homo sapiens
agatccaatggacttayatatccaactgacctt

SEQ ID NO: 7533 - DNA, 33 bp, Homo sapiens
aggacaatcccactaamaacaatccagctactt

SEQ ID NO: 7534 - DNA, 33 bp, Homo sapiens
aggagggaagacctaaytcatgagggatgggac

SEQ ID NO: 7535 - DNA, 33 bp, Homo sapiens
aggcaaggcttaatgckaaactttattgggagg

SEQ ID NO: 7536 - DNA, 33 bp, Homo sapiens
agtaaagacagttcacygaggggagatgactgg

SEQ ID NO: 7537 - DNA, 33 bp, Homo sapiens
agtctgtgactgtacargagtgtctgtgcaccc

SEQ ID NO: 7538 - DNA, 33 bp, Homo sapiens
agtgtttggaaaagaasctacctgccgcagcat

SEQ ID NO: 7539 - DNA, 33 bp, Homo sapiens
agtttgtaacagcaccragaagaaatggacatg

SEQ ID NO: 7540 - DNA, 33 bp, Homo sapiens
ataattgatataatttwaaaaatcctgcacatg

SEQ ID NO: 7541 - DNA, 33 bp, Homo sapiens
ataccatgaagagagawggaatgattgatagca

SEQ ID NO: 7542 - DNA, 33 bp, Homo sapiens
atacctgccctgcaaastacataaagctcttgg

SEQ ID NO: 7543 - DNA, 33 bp, Homo sapiens
atagaaaaggtgagaaraaagaatacagcagaa

SEQ ID NO: 7544 - DNA, 33 bp, Homo sapiens
acctccagagcaccacraatactggttttggga

SEQ ID NO: 7545 - DNA, 33 bp, Homo sapiens
atattctattcatctaycatctgaactattgaa

SEQ ID NO: 7546 - DNA, 33 bp, Homo sapiens
atcactcttggtcttayatagaaggaggtttct

SEQ ID NO: 7547 - DNA, 33 bp, Homo sapiens
atcctgcaggcatttayagcccataggcacttg

SEQ ID NO: 7548 - DNA, 33 bp, Homo sapiens
atgatgcttccacgtcrctcaagagattcttag

SEQ ID NO: 7549 - DNA, 33 bp, Homo sapiens
atggaagaaattgtagmaaaaggtgtcaggaga

SEQ ID NO: 7550 - DNA, 33 bp, Homo sapiens
atgggtaggattatcargacagtcctgggtaaa

SEQ ID NO: 7551 - DNA, 33 bp, Homo sapiens
attcaatagtggaggaygggcaaaatatcaaat

SEQ ID NO: 7552 - DNA, 33 bp, Homo sapiens
attcctgtaatgttccwattgctataattacat

SEQ ID NO: 7553 - DNA, 33 bp, Homo sapiens
caacaatagataaatartatgccaagtaatggt

SEQ ID NO: 7554 - DNA, 33 bp, Homo sapiens
caagtgatgaaatgtgwatctcctatatacaaa

SEQ ID NO: 7555 - DNA, 33 bp, Homo sapiens
caataatcaagaatacrgatcaattttatctgg

SEQ ID NO: 7556 - DNA, 33 bp, Homo sapiens
caattcttaagtgcatrataggcccacgaattt

SEQ ID NO: 7557 - DNA, 33 bp, Homo sapiens
cacagtgatactctgartacttggtcaatggga

SEQ ID NO: 7558 - DNA, 33 bp, Homo sapiens
cacatctccgtttacayagaaaaatgctctttt

SEQ ID NO: 7559 - DNA, 33 bp, Homo sapiens
caccaaataacactggycaatgctacatggagc

SEQ ID NO: 7560 - DNA, 33 bp, Homo sapiens
cacctaagctcaagaaygccagaatcatattaa

SEQ ID NO: 7561 - DNA, 33 bp, Homo sapiens
cagctgacaaccatgaygacttagaaacccatg

SEQ ID NO: 7562 - DNA, 33 bp, Homo sapiens
cagctggcaatttccarcggaaccctcttaaga

SEQ ID NO: 7563 - DNA, 33 bp, Homo sapiens
caggggaagaaattacrgtaatgaatataaccc

SEQ ID NO: 7564 - DNA, 33 bp, Homo sapiens
cagttagtggggtggargtagaacgtggacaac

SEQ ID NO: 7565 - DNA, 33 bp, Homo sapiens
catcaaatatttatcayactcgtctaatttcct

SEQ ID NO: 7566 - DNA, 33 bp, Homo sapiens
catctctctcctccaartcataatatctgttga

SEQ ID NO: 7567 - DNA, 33 bp, Homo sapiens
catgacaataatgttawacctgcaaattgcatt

SEQ ID NO: 7568 - DNA, 33 bp, Homo sapiens
catgagatccatccacygcagatgatttgaaaa

SEQ ID NO: 7569 - DNA, 33 bp, Homo sapiens
catggtgtatatctacmatattttattcatcca

SEQ ID NO: 7570 - DNA, 33 bp, Homo sapiens
cattctagtgaggagargcaaggagttaataag

SEQ ID NO: 7571 - DNA, 33 bp, Homo sapiens
ccaaaatataaggccgycacatgtggaatttta

SEQ ID NO: 7572 - DNA, 33 bp, Homo sapiens
ccaaattgaaagccacrctatataatgactgtt

SEQ ID NO: 7573 - DNA, 33 bp, Homo sapiens
ccaagacgtcagctgaraagattgtgtgcacct

SEQ ID NO: 7574 - DNA, 33 bp, Homo sapiens
ccaattgaggaagaagsaagcacctgtatcaat

SEQ ID NO: 7575 - DNA, 33 bp, Homo sapiens
ccatgagttgcccccaraccaattcttctgaag

SEQ ID NO: 7576 - DNA, 33 bp, Homo sapiens
cccaggaaaaaaatacraactcatgcactcaga

SEQ ID NO: 7577 - DNA, 33 bp, Homo sapiens
cccttagctgagaacckctactctagggcagtc

SEQ ID NO: 7578 - DNA, 33 bp, Homo sapiens
atctatattgaaccaartctaatatctatttgc

SEQ ID NO: 7579 - DNA, 33 bp, Homo sapiens
cctccactgtgacaaaygcataaatgaagttta

SEQ ID NO: 7580 - DNA, 33 bp, Homo sapiens
cctctgggaccaagcargacgtgcagagccaca

SEQ ID NO: 7581 - DNA, 33 bp, Homo sapiens
cctgcaaagtcactcaytctttaaaaattgtag

SEQ ID NO: 7582 - DNA, 33 bp, Homo sapiens
tattttgctagaaaccragaatctcagtatgaa

SEQ ID NO: 7583 - DNA, 33 bp, Homo sapiens
taatgtctccagacaarggcctcatccttccca

SEQ ID NO: 7584 - DNA, 33 bp, Homo sapiens
ccttgtttataagcackgatatatgatattaat

SEQ ID NO: 7585 - DNA, 33 bp, Homo sapiens
cgaaagcatttctttawcatcaattatattcca

SEQ ID NO: 7586 - DNA, 33 bp, Homo sapiens
cgcatacaaaacacacratcaacagagtaaaag

SEQ ID NO: 7587 - DNA, 33 bp, Homo sapiens
cgtcatggacagagtcraaaggctgccccacct

SEQ ID NO: 7588 - DNA, 33 bp, Homo sapiens
cgttttactaagtcctragatataaaggtgact

SEQ ID NO: 7589 - DNA, 33 bp, Homo sapiens
ctccagcaaaattatcraaacacttttatgctc

SEQ ID NO: 7590 - DNA, 33 bp, Homo sapiens
ctgaagtggggggaatwatagagctcaggaggt

SEQ ID NO: 7591 - DNA, 33 bp, Homo sapiens
ctgtactctggttaaartgataaaatttatgtc

SEQ ID NO: 7592 - DNA, 33 bp, Homo sapiens
cttaaaacagaagaggkatctttcactttgagt

SEQ ID NO: 7593 - DNA, 33 bp, Homo sapiens
cttttcagtgtctcackccagattcttgtgtca

SEQ ID NO: 7594 - DNA, 33 bp, Homo sapiens
cttttcttctttcttcrcattaggaatgagaag

SEQ ID NO: 7595 - DNA, 33 bp, Homo sapiens
ctttttttctgcagaastattccacactttatg

SEQ ID NO: 7596 - DNA, 33 bp, Homo sapiens
gaaaataggatagtggyaaacccaggaagtatc

SEQ ID NO: 7597 - DNA, 33 bp, Homo sapiens
gaacacctaccacacartgtacgccaaaccttc

SEQ ID NO: 7598 - DNA, 33 bp, Homo sapiens
gtgtatataatttttasctcctcagctatgatc

SEQ ID NO: 7599 - DNA, 33 bp, Homo sapiens
gaagaccactctcatcrcagcaaaagccttcag

SEQ ID NO: 7600 - DNA, 33 bp, Homo sapiens
gaagatgctgaatggaygcatttttcaaaagag

SEQ ID NO: 7601 - DNA, 33 bp, Homo sapiens
gaagttgttctctaggrataaaacaagactcca

SEQ ID NO: 7602 - DNA, 33 bp, Homo sapiens
ttattggagttataaaygacatccataatacaa

SEQ ID NO: 7603 - DNA, 33 bp, Homo sapiens
gaatttttctgaggcaytgaatagtgaatttga

SEQ ID NO: 7604 - DNA, 33 bp, Homo sapiens
gacccaatttgattcawgttatttcaaaactca

SEQ ID NO: 7605 - DNA, 33 bp, Homo sapiens
gactgaacttgatctasattcttaccctttttc

SEQ ID NO: 7606 - DNA, 33 bp, Homo sapiens
gagtgcgtacttaaaakaattgaaggtctggcg

SEQ ID NO: 7607 - DNA, 33 bp, Homo sapiens
gatgagactaactaaayaaaggagacggatttc

SEQ ID NO: 7608 - DNA, 33 bp, Homo sapiens
gcaattagtaatcagcrcaactgatggtctgag

SEQ ID NO: 7609 - DNA, 33 bp, Homo sapiens
gcagagtagttacaagraacctctcctaattca

SEQ ID NO: 7610 - DNA, 33 bp, Homo sapiens
gcagccaggagacccgkcagagctattgaaagc

SEQ ID NO: 7611 - DNA, 33 bp, Homo sapiens
gcccccgagtgtctagracagaacctggcactc

SEQ ID NO: 7612 - DNA, 33 bp, Homo sapiens
gccctcctggtgaaagrcctaacatcgaggtcc

SEQ ID NO: 7613 - DNA, 33 bp, Homo sapiens
gctaaggagaacacgcygccaggatgtgctgca

SEQ ID NO: 7614 - DNA, 33 bp, Homo sapiens
gctcgcagaaccctaasgcatgattaggcctgg

SEQ ID NO: 7615 - DNA, 33 bp, Homo sapiens
gctgctttctggctcargtatggcttcttggct

SEQ ID NO: 7616 - DNA, 33 bp, Homo sapiens
gcttcactcctaatgargttctcggactccaca

SEQ ID NO: 7617 - DNA, 33 bp, Homo sapiens
ggaaataacataaagawgaggacgtgcaggaag

SEQ ID NO: 7618 - DNA, 33 bp, Homo sapiens
gggagaggagatcttcrccacttaaaataacta

SEQ ID NO: 7619 - DNA, 33 bp, Homo sapiens
gtgaagttgtgtataayagtcttctacaggctc

SEQ ID NO: 7620 - DNA, 33 bp, Homo sapiens
gttaagctctgcatacmacataccatttgtcac

SEQ ID NO: 7621 - DNA, 33 bp, Homo sapiens
gttatctgtctttgaaragcatattactgtctt

SEQ ID NO: 7622 - DNA, 33 bp, Homo sapiens
tacgatcatctaggaamctgttgaaaatgcaga

SEQ ID NO: 7623 - DNA, 33 bp, Homo sapiens
tgttgatgtgactctargattaggcagttgctg

SEQ ID NO: 7624 - DNA, 33 bp, Homo sapiens
ttgcccagcagtcagcsctgttttttctgaagg

SEQ ID NO: 7625 - DNA, 33 bp, Homo sapiens
tttcctaaactcatcayggcaagaacatataac

SEQ ID NO: 7626 - DNA, 33 bp, Homo sapiens
ttgcagggtttctgtayagtaatgcacatttct

SEQ ID NO: 7627 - DNA, 33 bp, Homo sapiens
tggtgctttctggagawaaaacgcagccgttgc

SEQ ID NO: 7628 - DNA, 33 bp, Homo sapiens
caagtgacctagctgasaagatcatacatttgc

SEQ ID NO: 7629 - DNA, 33 bp, Homo sapiens
gacatttcaaacgttgsagtaaaaattgacatc

SEQ ID NO: 7630 - DNA, 33 bp, Homo sapiens
aatgaagccagattgartaggtgttataattcc

SEQ ID NO: 7631 - DNA, 33 bp, Homo sapiens
aactgattttgaagacraatacgactctagtgt

SEQ ID NO: 7632 - DNA, 33 bp, Homo sapiens
aaggtggcagaaccgcrgaaatgcaggtttctc

SEQ ID NO: 7633 - DNA, 33 bp, Homo sapiens
aagtagcttagattgargaccagtggaattgaa

SEQ ID NO: 7634 - DNA, 33 bp, Homo sapiens
aagtgagtctcacaggyatcgatggggcagcat

SEQ ID NO: 7635 - DNA, 33 bp, Homo sapiens
agaaactttcaagtacygtaatagctttcagtc

SEQ ID NO: 7636 - DNA, 33 bp, Homo sapiens
agtaacatcatgagacrgaacttttattttctt

SEQ ID NO: 7637 - DNA, 33 bp, Homo sapiens
agttttaatgtgaacartaaactggagatcttg

SEQ ID NO: 7638 - DNA, 33 bp, Homo sapiens
atcaaatgtacaaaaakgcttctcaagaacatt

SEQ ID NO: 7639 - DNA, 33 bp, Homo sapiens
atctgacaacactgcamatttatgctgaataca

SEQ ID NO: 7640 - DNA, 33 bp, Homo sapiens
caaaggctttgcaagaraaaacatccactttcc

SEQ ID NO: 7641 - DNA, 33 bp, Homo sapiens
caagatagtagcataartaagcagcaggtctgt

SEQ ID NO: 7642 - DNA, 33 bp, Homo sapiens
cacttaagttcaaaacrcaatatcataaaccaa

SEQ ID NO: 7643 - DNA, 33 bp, Homo sapiens
cagcaccagctctgggraggaagagataagctg

SEQ ID NO: 7644 - DNA, 33 bp, Homo sapiens
cccaagaagttctcaargttgcaggctcaatac

SEQ ID NO: 7645 - DNA, 33 bp, Homo sapiens
cctgacttgacttaaasgtataaaagaggaagt

SEQ ID NO: 7646 - DNA, 33 bp, Homo sapiens
ccttcttaatctcatayggttagcttttgttgg

SEQ ID NO: 7647 - DNA, 33 bp, Homo sapiens
ctcctccttgagcacasagttgaagcttgcagg

SEQ ID NO: 7648 - DNA, 33 bp, Homo sapiens
gatgggaagtgtcagayatcagttccacaactc

SEQ ID NO: 7649 - DNA, 33 bp, Homo sapiens
gcctttcttggcaaaaygaatagaaagccatct

SEQ ID NO: 7650 - DNA, 33 bp, Homo sapiens
gcgtcgtaacaactgcratgtcttatcttcagt

SEQ ID NO: 7651 - DNA, 33 bp, Homo sapiens
ggaaggaatgcaaacargagaagggtgttcaac

SEQ ID NO: 7652 - DNA, 33 bp, Homo sapiens
ggtgaatgagttctgayctttcttctataattt

SEQ ID NO: 7653 - DNA, 33 bp, Homo sapiens
cttgcctaagcctctgyatctgtcctcagcact

SEQ ID NO: 7654 - DNA, 33 bp, Homo sapiens
cataatacagaatagarctggaatccaagtcga

SEQ ID NO: 7655 - DNA, 33 bp, Homo sapiens
accagtttagctagaamtatgatataaaagagg

SEQ ID NO: 7656 - DNA, 33 bp, Homo sapiens
ggattaagaatatacaygtaacagctaaaacta

SEQ ID NO: 7657 - DNA, 33 bp, Homo sapiens
gggcaatgtttccatcmacaagagatgggcgca

SEQ ID NO: 7658 - DNA, 33 bp, Homo sapiens
gtaaacttgtctcttcrctgtagctgctcttag

SEQ ID NO: 7659 - DNA, 33 bp, Homo sapiens
gtcattgctcagtaaaytctagatcccatccaa

SEQ ID NO: 7660 - DNA, 33 bp, Homo sapiens
gtggttgatacacagawgttcactgtattgtag

SEQ ID NO: 7661 - DNA, 33 bp, Homo sapiens
gttaaatagggatttcrattgccaaaaaaacct

SEQ ID NO: 7662 - DNA, 33 bp, Homo sapiens
gttggtgacagcttaaytgatgatgcatagtgg

SEQ ID NO: 7663 - DNA, 33 bp, Homo sapiens
tatattacagcatctaygagtcgataaatttat

SEQ ID NO: 7664 - DNA, 33 bp, Homo sapiens
tcatgtgttcctatacraggccttttacagact

SEQ ID NO: 7665 - DNA, 33 bp, Homo sapiens
atgttgacaatttcccrctattttgaaggacat

SEQ ID NO: 7666 - DNA, 33 bp, Homo sapiens
tctatttcttgttgccrccaataccatgatcga

SEQ ID NO: 7667 - DNA, 33 bp, Homo sapiens
tctgattgactaagcamagataaaccctggagt

SEQ ID NO: 7668 - DNA, 33 bp, Homo sapiens
tcttaatgcactctcawaaataaacaaaaggag

SEQ ID NO: 7669 - DNA, 33 bp, Homo sapiens
tctttactgaggtcacracatctcaattttgtg

SEQ ID NO: 7670 - DNA, 33 bp, Homo sapiens
tgtataaattcctaackatactgcagacacctc

SEQ ID NO: 7671 - DNA, 33 bp, Homo sapiens
tgtctaagtgtgtgcawaccccaacagaaggaa

SEQ ID NO: 7672 - DNA, 33 bp, Homo sapiens
tgtgaaagtgcacacawctgtgagtgattaagc

SEQ ID NO: 7673 - DNA, 33 bp, Homo sapiens
ttagaacctcacagaartaattgctgcaatcaa

SEQ ID NO: 7674 - DNA, 33 bp, Homo sapiens
ttatgtggattaagatrataaagtgatctttat

SEQ ID NO: 7675 - DNA, 33 bp, Homo sapiens
ttgaagacagtgctcaragtaagtgcaaagagg

SEQ ID NO: 7676 - DNA, 33 bp, Homo sapiens
tttgtttctctttcatrataaggactggatctt

SEQ ID NO: 7677 - DNA, 33 bp, Homo sapiens
ttaatggttttggcaayatgcaatactcatgtc

SEQ ID NO: 7678 - DNA, 33 bp, Homo sapiens
atggtgcagacatagarcattattagccattat

SEQ ID NO: 7679 - DNA, 33 bp, Homo sapiens
tccctccttcttccagrctctaaccgccagcta

SEQ ID NO: 7680 - DNA, 33 bp, Homo sapiens
ataaataaaatgccatsagtattacctactgct

SEQ ID NO: 7681 - DNA, 33 bp, Homo sapiens
ggtactacttgactttyaacattatacacatga

SEQ ID NO: 7682 - DNA, 33 bp, Homo sapiens
aagcccagcagcttgaracataaagcgaggtgt

SEQ ID NO: 7683 - DNA, 33 bp, Homo sapiens
aagctaagcattttgaraacagcttctgccttt

SEQ ID NO: 7684 - DNA, 33 bp, Homo sapiens
aagctcacagaatttawcacacaactcagggac

SEQ ID NO: 7685 - DNA, 33 bp, Homo sapiens
aagtgaggctacaaagwcatgggagttaaatga

SEQ ID NO: 7686 - DNA, 33 bp, Homo sapiens
aattcaaatgatgcacmcataatatgttctcta

SEQ ID NO: 7687 - DNA, 33 bp, Homo sapiens
accccactgaaaaatgkaagtcaacaccgatcc

SEQ ID NO: 7688 - DNA, 33 bp, Homo sapiens
acccgggaagtgaagamagtgcagtgaactgtg

SEQ ID NO: 7689 - DNA, 33 bp, Homo sapiens
acgtggtatttctttcraagccggttgcaaacc

SEQ ID NO: 7690 - DNA, 33 bp, Homo sapiens
agatagagcattattgraatgggcttattcaaa

SEQ ID NO: 7691 - DNA, 33 bp, Homo sapiens
agctccctgtcttctcmgaataaaacccagtgg

SEQ ID NO: 7692 - DNA, 33 bp, Homo sapiens
aggatggcctcagaccrcgggaaggaactagac

SEQ ID NO: 7693 - DNA, 33 bp, Homo sapiens
aggttaagctgaaagaygcttgaaacttcagat

SEQ ID NO: 7694 - DNA, 33 bp, Homo sapiens
ataataacaaatatgaygactcactgagcattt

SEQ ID NO: 7695 - DNA, 33 bp, Homo sapiens
atacaatcctctcccayagtcactgttcaggag

SEQ ID NO: 7696 - DNA, 33 bp, Homo sapiens
attgttttggtaggcamactttcagaactcttc

SEQ ID NO: 7697 - DNA, 33 bp, Homo sapiens
gtgtccattccttaatyagctagatccaccata

SEQ ID NO: 7698 - DNA, 33 bp, Homo sapiens
catgtttgtaaagaaartagggctaatgaggaa

SEQ ID NO: 7699 - DNA, 33 bp, Homo sapiens
catttgttcttgacacrgccatgcaaatgttag

SEQ ID NO: 7700 - DNA, 33 bp, Homo sapiens
ccagtttgaatgaaaamcatcactgaaataatc

SEQ ID NO: 7701 - DNA, 33 bp, Homo sapiens
ccatgtggtagcaatakccttacaattttcgct

SEQ ID NO: 7702 - DNA, 33 bp, Homo sapiens
ttcttggatcatttggmaatgtgaaagatctac

SEQ ID NO: 7703 - DNA, 33 bp, Homo sapiens
cctgtgtctagaaatarcttcatagaagaagac

SEQ ID NO: 7704 - DNA, 33 bp, Homo sapiens
cgtctaactaacaacastgtggtattagtgcct

SEQ ID NO: 7705 - DNA, 33 bp, Homo sapiens
ctctcctcctcacgcargttcgaccttagctca

SEQ ID NO: 7706 - DNA, 33 bp, Homo sapiens
gaacaaaagcacatagyatcttaaatgcagttt

SEQ ID NO: 7707 - DNA, 33 bp, Homo sapiens
gaagatgattacccaarccatcaggtacacaga

SEQ ID NO: 7708 - DNA, 33 bp, Homo sapiens
gacttgtttggtaaagwattggcagagtatcat

SEQ ID NO: 7709 - DNA, 33 bp, Homo sapiens
gattacattttgcttcragtgcctcagggctca

SEQ ID NO: 7710 - DNA, 33 bp, Homo sapiens
gcaatcacatgtatcakctggaggtctcactag

SEQ ID NO: 7711 - DNA, 33 bp, Homo sapiens
gctggacatggattackactttcgcactttaac

SEQ ID NO: 7712 - DNA, 33 bp, Homo sapiens
gcttctctttttcacgycctcaagcctgaaaat

SEQ ID NO: 7713 - DNA, 33 bp, Homo sapiens
tagttacccaacattaygccaagatcagtgatt

SEQ ID NO: 7714 - DNA, 33 bp, Homo sapiens
tggagatctaaaaatcmaaatgcattgaatttt

SEQ ID NO: 7715 - DNA, 33 bp, Homo sapiens
ttcctgttttcacctcyatacgatgataccaat

SEQ ID NO: 7716 - DNA, 33 bp, Homo sapiens
tttgaaatacataacasgaactcaaaaatgaaa

SEQ ID NO: 7717 - DNA, 33 bp, Homo sapiens
acagacaagcactaacycaatgtcacagagctc

SEQ ID NO: 7718 - DNA, 33 bp, Homo sapiens
ggtagtaaaataggccygaatacagcaaatcac

SEQ ID NO: 7719 - DNA, 33 bp, Homo sapiens
caactccataccatgcraggggaccacaggtgt

SEQ ID NO: 7720 - DNA, 33 bp, Homo sapiens
taccctctgacttttarccaccttgatcattgc

SEQ ID NO: 7721 - DNA, 33 bp, Homo sapiens
cctgaggggacattagrattttcttcctggatt

SEQ ID NO: 7722 - DNA, 33 bp, Homo sapiens
gcattttccaaacagasgctgattgtttatact

SEQ ID NO: 7723 - DNA, 33 bp, Homo sapiens
cggacacctacctaacwattcgccacccttcca

SEQ ID NO: 7724 - DNA, 33 bp, Homo sapiens
ataaaacaatcttaggmcattgataaagagaaa

SEQ ID NO: 7725 - DNA, 33 bp, Homo sapiens
aattacggtgaagacargaaaaatgggaaagag

SEQ ID NO: 7726 - DNA, 33 bp, Homo sapiens
atgcattgaaaatgacraatgaaatccctttat

SEQ ID NO: 7727 - DNA, 33 bp, Homo sapiens
tatatcttacaaattasgaagttctttgtaggt

SEQ ID NO: 7728 - DNA, 33 bp, Homo sapiens
caagcttgtgctgctasaactcaagggactctg

SEQ ID NO: 7729 - DNA, 33 bp, Homo sapiens
gagtctaatatggtcargtgttaaaattctttc

SEQ ID NO: 7730 - DNA, 33 bp, Homo sapiens
cccttttcatgctactyaacattacgaatctca
